(19) United States
(12) Patent Application Publication
(10) Pub. No.: US 2006/0240441 A1
(43) Pub. Date: Oct. 26, 2006

(54) Gene expression profiles and methods of use

(75) Inventors: Ian Taylor, Madison, CT (US); Nicole R. Pauloski, Branford, CT (US); Douglas Bigwood, Madison, CT (US)

Correspondence Address: JEFFREY M. GREENMAN, BAYER PHARMACEUTICALS CORPORATION, 400 MORGAN LANE, WEST HAVEN, CT, 06516, US

(73) Assignee: BAYER PHARMACEUTICALS CORPORATION, West Haven, CT (US)

(21) Appl. No.: 10/574,398

(22) PCT Filed: Oct. 1, 2004
(86) PCT No.: PCT/US04/34163

§ 371 Date: Mar. 31, 2006

Related U.S. Application Data
(60) Provisional application No. 60/508,355, filed on Oct. 3, 2003.

(51) Int. Cl. C12Q 1/68

(52) U.S. Cl. 435/6

(57) ABSTRACT

The present invention relates to gene expression profiles for lung cancer, microarrays comprising nucleic acid sequences representing gene expression profiles, and methods of using expression profiles and microarrays. The invention also provides methods and compositions for diagnostic assays for detecting cancer and therapeutic methods and compositions for treating cancer. The invention also provides methods for designing, identifying, and optimizing therapeutics for cancer.

[0001] This application claims benefit of U.S. Provisional Application Ser. No. 60/508,355, filed Oct. 3, 2003, the contents of which are incorporated herein by reference in their entirety.

### FIELD OF THE INVENTION

[0002] The present invention relates to gene expression profiles, microarrays comprising nucleic acid sequences representing gene expression profiles, and methods of using gene expression profiles and microarrays.

### BACKGROUND OF THE INVENTION

[0003] Many disease states are characterized by differences in the expression levels of various genes either through changes in the copy number of the genetic DNA or through changes in levels of transcription of particular genes (e.g., through control of initiation, provision of RNA precursors, RNA processing, etc.). For example, losses and gains of genetic material play an important role in malignant transformation and progression. These gains and losses are thought to be “driven” by at least two kinds of genes, oncogenes and tumor suppressor genes. Oncogenes are positive regulators of tumorgenesis, while tumor suppressor genes are negative regulators of tumorgenesis (Marshall, Cell 64:313-326, 1991; Weinberg, Science 254:1138-1146, 1991). Therefore, one mechanism of activating unregulated growth is to increase the number of genes coding for oncogene proteins or to increase the level of expression of these oncogenes (e.g., in response to cellular or environmental changes), and another mechanism is to lose genetic material or to decrease the level of expression of genes that code for tumor suppressors. This model is supported by the losses and gains of genetic material associated with glioma progression (Mikkelson, et al., J. Cellular Biochem. 46:3-8, 1991). Thus, changes in the expression (transcription) levels of particular genes (e.g., oncogenes or tumor suppressors) serve as signposts for the presence and progression of various cancers.

[0004] Compounds which are used as therapeutics to treat these various diseases (e.g., cancer) presumably reverse some, or all, of these gene expression changes. The expression change of at least some of these genes may therefore, be used as a method to monitor, or even predict, the efficacy of such therapeutics. The analysis of these expression changes may be performed in the target tissue of interest (e.g., tumor) or in some surrogate cell population (e.g., peripheral blood leukocytes). In the latter case, correlation of the gene expression changes with efficacy (e.g., tumor shrinkage or non-growth) must be especially strong for the expression change pattern to be used as a marker for efficacy.

[0005] A number of laboratories have reported success in using gene expression analysis, via microarrays or other methods, to classify human tumors at the molecular level (Bittner, et al., Nature 406:536-540, 2000; Alon, et al., Proc. Natl. Acad. Sci. USA 96:6745-6750, 1999; Alizadeh, et al., Nature 403:503-511, 2000; Golub, et al., Science 286:531-537, 1999; Perou, et al., Proc. Natl. Acad. Sci. 96:9212-9217, 1999; Kahn, et al., Am. J. Pathol. 156:1887-1900, 2000). Genes, either individually or as a subset, identified in this way may be used as markers that could be tracked for changes that correlate with efficacy of a therapeutic compound(s) or to predict which patients might benefit from a particular therapeutic. Total RNA was isolated from ten human lung tumors and from normal adjacent tissue (NAT), and the RNA was analyzed from each sample using Affymetrix technology.

### SUMMARY OF THE INVENTION

[0006] The present invention is directed to gene expression profiles for lung cancer, microarrays comprising nucleic acid sequences representing said gene expression profiles, and methods of using said gene expression profiles and microarrays.

[0007] In one embodiment of the present invention, the gene expression profile is an expression profile comprising one or more genes (e.g., SEQ ID NOs: 1, 3, 5, 7, 9, 11, 13, 15, 17, 19, 21, 23, 25, 27, 29, 31, 33, 35, 37, 39, 41, 43, 45, 47, 49, 51, 53, 55, 57, 59, 61, 63, 65, 67, 69, 71, 73, 74, 76, 78, 80, 82, 84, 86, 88, 90, 92, 94, 96, 98, 100, 102, 104, 106, 108, 110, 112, 114, 116, 118, 120, 122, 124, 126, 128, 130, 132, 134, 136, 138, 140, 142, 144, 146, 148, 150, 152, 154, 156, 158, 160, 162, 164, 166, 168, 170, 172, 174, 176, 178, 180, 182, 184, 186, 188, 190, 192, 194, 196, 198, 200, 202, 204, 206, 208, 210, 212, 214, 216, 218, 220, 222, 224, 226, 228, 230, 232, 234, 236, 238, 240, 242, 244, 246, 248, 250, 252, 254, 256, 258, 260, 262, 264, 266, 268, 270, 272, 274, 276, 278, 280, 282, 284, 286, 288, 290, 292, 294, 296, 298, 300, 302, 304, 306, 308, 310, 312, 314, 316, 318, 320, 322, 324, 326, 328, 330, 332, 334, 336, 338, 340, 342, 344, 346, 348, 350, 353, 355, 357, 359, 361, 363, 365, 367, 369, 371, 373, 375, 377, 379, 381, 383, 385, 387, 389, 391, 393, 395, 397, 399) that demonstrate altered expression in human lung tumors versus normal adjacent tissue (NAT).

[0008] In another embodiment, the expression profile is an expression profile comprising one or more polypeptides (e.g., SEQ ID NOs: 2, 4, 6, 8, 10, 12, 14, 16, 18, 20, 22, 24, 26, 28, 30, 32, 34, 36, 38, 40, 42, 44, 46, 48, 50, 52, 54, 56, 58, 60, 62, 64, 66, 68, 70, 72, 75, 77, 79, 81, 83, 85, 87, 89, 91, 93, 95, 97, 99, 101, 103, 105, 107, 109, 111, 113, 115, 117, 119, 121, 123, 125, 127, 129, 131, 133, 135, 137, 139, 141, 143, 145, 147, 149, 151, 153, 155, 157, 159, 161, 163, 165, 167, 169, 171, 173, 175, 177, 179, 181, 183, 185, 187, 189, 191, 193, 195, 197, 199, 201, 203, 205, 207, 209, 211, 213, 215, 217, 219, 221, 223, 225, 227, 229, 231, 233, 235, 237, 239, 241, 243, 245, 247, 249, 251, 253, 255, 257, 259, 261, 263, 265, 267, 269, 271, 273, 275, 277, 279, 281, 283, 285, 287, 289, 291, 293, 295, 297, 299, 301, 303, 305, 307, 309, 311, 313, 315, 317, 319, 321, 323, 325, 327, 329, 331, 333, 335, 337, 339, 341, 343, 345, 347, 349, 351, 352, 354, 356, 358, 360, 362, 364, 366, 368, 370, 372, 374, 376, 378, 380, 382, 384, 386, 388, 390, 392, 394, 369, 398, 400) that demonstrate altered expression in human lung tumors versus normal adjacent tissue (NAT).

[0009] In another embodiment of the present invention, the gene expression profile may be an expression profile comprising one or more genes selected from the group consisting of the genes listed in Table 1 to 3. In a further embodiment of the present invention, the gene expression profiles comprise one or more biomarkers isolated from the group comprising the genes listed in the Tables.

[0010] The present invention is also directed to the discovery of the gene expression profile of human lung tumors and normal adjacent tissue. As described in the Examples and in the Tables, human lung tumors have genes which are expressed at higher levels (i.e., which are up-regulated) and genes which are expressed at lower levels (i.e., which are down-regulated) relative to normal adjacent tissue. Sets of genes which are up-regulated or down-regulated are referred to herein as “genes characteristic of human lung tumor tissue.”

[0011] Also within the scope of the present invention are microarrays comprising one or more genes that demonstrate altered expression in human lung tumor tissue. In another embodiment of the present invention, the microarray may be a microarray comprising one or more genes selected from the group consisting of the genes listed in the Tables. In a further embodiment, the microarray may-be a microarray comprising one or more biomarkers isolated from the group comprising the genes listed in the Tables.

[0012] In addition, it is an objective of the invention to provide methods and reagents for the prediction, diagnosis, prognosis, and therapy of cancer.

[0013] This invention also relates to methods for using said microarrays which include, but are not limited to, screening the effects of a drug or treatment on tissue or cell samples, screening toxicity effects on tissue or cell samples, identifying a disease state in a tissue or cell sample, providing a patient diagnosis, predicting a patient's response to treatment, distinguishing between control and drug-treated samples, distinguishing between normal and tumor samples, discovering novel drugs, and determining the level of gene expression in a tissue or cell sample.

[0014] Another embodiment of the present invention is a method for screening the effects of a drug on a tissue or cell sample comprising the step of analyzing the level of expression of one or more genes (e.g., SEQ ID NOs: 1, 3, 5, 7, 9, 11, 13, 15, 17, 19, 21, 23, 25, 27, 29, 31, 33, 35, 37, 39, 41, 43, 45, 47, 49, 51, 53, 55, 57, 59, 61, 63, 65, 67, 69, 71, 73, 74, 76, 78, 80, 82, 84, 86, 88, 90, 92, 94, 96, 98, 100, 102, 104, 106, 108, 110, 112, 114, 116, 118, 120, 122, 124, 126, 128, 130, 132, 134, 136, 138, 140, 142, 144, 146, 148, 150, 152, 154, 156, 158, 160, 162, 164, 166, 168, 170, 172, 174, 176, 178, 180, 182, 184, 186, 188, 190, 192, 194, 196, 198, 200, 202, 204, 206, 208, 210, 212, 214, 216, 218, 220, 222, 224, 226, 228, 230, 232, 234, 236, 238, 240, 242, 244, 246, 248, 250, 252, 254, 256, 258, 260, 262, 264, 266, 268, 270, 272, 274, 276, 278, 280, 282, 284, 286, 288, 290, 292, 294, 296, 298, 300, 302, 304, 306, 308, 310, 312, 314, 316, 318, 320, 322, 324, 326, 328, 330, 332, 334, 336, 338, 340, 342, 344, 346, 348, 350, 353, 355, 357, 359, 361, 363, 365, 367, 369, 371, 373, 375, 377, 379, 381, 383, 385, 387, 389, 391, 393, 395, 397, 399) and/or gene products (e.g., SEQ ID NOs: 2, 4, 6, 8, 10, 12, 14, 16, 18, 20, 22, 24, 26, 28, 30, 32, 34, 36, 38, 40, 42, 44, 46, 48, 50, 52, 54, 56, 58, 60, 62, 64, 66, 68, 70, 72, 75, 77, 79, 81, 83, 85, 87, 89, 91, 93, 95, 97, 99, 101, 103, 105, 107, 109, 111, 113, 115, 117, 119, 121, 123, 125, 127, 129, 131, 133, 135, 137, 139, 141, 143, 145, 147, 149, 151, 153, 155, 157, 159, 161, 163, 165, 167, 169, 171, 173, 175, 177, 179, 181, 183, 185, 187, 189, 191, 193, 195, 197, 199, 201, 203, 205, 207, 209, 211, 213, 215, 217, 219, 221, 223, 225, 227, 229, 231, 233, 235, 237, 239, 241, 243, 245, 247, 249, 251, 253, 255, 257, 259, 261, 263, 265, 267, 269, 271, 273, 275, 277, 279, 281, 283, 285, 287, 289, 291, 293, 295, 297, 299, 301, 303, 305, 307, 309, 311, 313, 315, 317, 319, 321, 323, 325, 327, 329, 331, 333, 335, 337, 339, 341, 343, 345, 347, 349, 351, 352, 354, 356, 358, 360, 362, 364, 366, 368, 370, 372, 374, 376, 378, 380, 382, 384, 386, 388, 390, 392, 394, 369, 398, 400), wherein the gene expression and/or gene product levels in the tissue or cell sample are analyzed before and after exposure to the drug, and a variation in the expression level of the gene and/or gene product is indicative of a drug effect or provides a patient diagnosis or predicts a patient's response to the treatment.

[0015] Another aspect of the present invention is a method for discovering novel drugs comprising the step of analyzing the level of expression of one or more genes and/or gene products, wherein the gene expression and/or gene product levels of the cells are analyzed before and after exposure to the drug, and a variation in the expression level of the gene and/or gene product is indicative of drug efficacy.

[0016] The invention further provides a method for identifying a compound useful for the treatment of cancer comprising administering to a subject with cancer a test compound, and measuring the activity of the polypeptide (e.g., the polypeptides encoded by SEQ ID NOs: 2, 4, 6, 8, 10, 12, 14, 16, 18, 20, 22, 24, 26, 28, 30, 32, 34, 36, 38, 40, 42, 44, 46, 48, 50, 52, 54, 56, 58, 60, 62, 64, 66, 68, 70, 72, 75, 77, 79, 81, 83, 85, 87, 89, 91, 93, 95, 97, 99, 101, 103, 105, 107, 109, 111, 113, 115, 117, 119, 121, 123, 125, 127, 129, 131, 133, 135, 137, 139, 141, 143, 145, 147, 149, 151, 153, 155, 157, 159, 161, 163, 165, 167, 169, 171, 173, 175, 177, 179, 181, 183, 185, 187, 189, 191, 193, 195, 197, 199, 201, 203, 205, 207, 209, 211, 213, 215, 217, 219, 221, 223, 225, 227, 229, 231, 233, 235, 237, 239, 241, 243, 245, 247, 249, 251, 253, 255, 257, 259, 261, 263, 265, 267, 269, 271, 273, 275, 277, 279, 281, 283, 285, 287, 289, 291, 293, 295, 297, 299, 301, 303, 305, 307, 309, 311, 313, 315, 317, 319, 321, 323, 325, 327, 329, 331, 333, 335, 337, 339, 341, 343, 345, 347, 349, 351, 352, 354, 356, 358, 360, 362, 364, 366, 368, 370, 372, 374, 376, 378, 380, 382, 384, 386, 388, 390, 392, 394, 369, 398, 400), wherein a change in the activity of the polypeptide is indicative of the test compound being useful for the treatment of cancer.

[0017] The invention, thus, provides methods which may be used to identify compounds which may act, for example, as regulators or modulators such as agonists and antagonists, partial agonists, inverse agonists, activators, co-activators, and inhibitors. Accordingly, the invention provides reagents and methods for regulating the expression of a polynucleotide or a polypeptide associated with cancer. Reagents that modulate the expression, stability, or amount of a polynucleotide or the activity of the polypeptide may be a protein, a peptide, a peptidomimetic, a nucleic acid, a nucleic acid analogue (e.g., peptide nucleic acid, locked nucleic acid), or a small molecule.

[0018] The present invention also provides a method for providing a patient diagnosis comprising the step of analyzing the level of expression of one or more genes and/or gene products, wherein the gene expression and/or gene product levels of normal and patient samples are analyzed, and a variation in the expression level of the gene and/or gene product in the patient sample is diagnostic of a disease. The patient samples include, but are not limited to, blood, amniotic fluid, plasma, semen, bone marrow, and tissue biopsy.

[0019] The present invention still further provides a method of diagnosing cancer in a subject comprising measuring the activity of the polypeptide in a subject suspected of having cancer, wherein if there is a difference in the activity of the polypeptide, relative to the activity of the polypeptide in a subject not suspected of having cancer, then the subject is diagnosed has having cancer.

[0020] In another embodiment, the invention provides a method for detecting cancer in a patient sample in which an antibody to a protein is used to react with proteins in the patient sample.

[0021] Another aspect of the present invention is a method for distinguishing between normal and disease states comprising the step of analyzing the level of expression of one or more genes and/or gene products, wherein the gene expression and/or gene product levels of normal and disease tissues are analyzed, and a variation in the expression level of the gene and/or gene product is indicative of a disease state.

[0022] In another embodiment, the invention pertains to a method of determining the phenotype of cells comprising detecting the differential expression, relative to normal cells, of at least one gene, wherein the gene is differentially expressed by at least a factor of two, at least a factor of five, at least a factor of twenty, or at least a factor of fifty.

[0023] In yet another embodiment, the invention pertains to a method of determining the phenotype of cells, comprising detecting the differential expression, relative to normal cells, of at least one polypeptide, wherein the protein is differentially expressed by at least a factor of two, at least a factor of five, at least a factor of twenty, an up to at least a factor of fifty.

[0024] In another embodiment, the invention pertains to a method for determining the phenotype of cells from a patient by providing a nucleic acid probe comprising a nucleotide sequence having at least about 10, at least about 15, at least about 25, or at least about 40 consecutive nucleotides, obtaining a sample of cells from a patient, optionally providing a second sample of cells substantially all of which are non-cancerous, contacting the nucleic acid probe under stringent conditions with mRNA of each of said first and second cell samples, and comparing (a) the amount of hybridization of the probe with mRNA of the first cell sample, with (b) the amount of hybridization of the probe with mRNA of the second cell sample, wherein a difference of at least a factor of two, at least a factor of five, at least a factor of twenty, or at least a factor of fifty in the amount of hybridization with the mRNA of the first cell sample as compared to the amount of hybridization with the mRNA of the second cell sample is indicative of the phenotype of cells in the first cell sample.

[0025] In another embodiment, the invention provides a test kit for identifying the presence of cancerous cells or tissues, comprising a probe/primer, for measuring a level of a nucleic acid in a sample of cells isolated from a patient. In certain embodiments, the kit may further include instructions for using the kit, solutions for suspending or fixing the cells, detectable tags or labels, solutions for rendering a nucleic acid susceptible to hybridization, solutions for lysing cells, or solutions for the purification of nucleic acids.

[0026] In one embodiment, the invention provides a test kit for identifying the presence of cancer cells or tissues, comprising an antibody specific for a protein. In certain embodiments, the kit further includes instructions for using the kit. In certain embodiments, the kit may further include solutions for suspending or fixing the cells, detectable tags or labels, solutions for rendering a polypeptide susceptible to the binding of an antibody, solutions for lysing cells, or solutions for the purification of polypeptides.

[0027] In another embodiment, the invention provides a test kit for monitoring the efficacy of a compound or therapeutic in cancerous cells or tissues, comprising a probe/primer, for measuring a level of a nucleic acid in a sample of cells isolated from a patient. In certain embodiments, the kit may further include instructions for using the kit, solutions for suspending or fixing the cells, detectable tags or labels, solutions for rendering a nucleic acid susceptible to hybridization, solutions for lysing cells, or solutions for the purification of nucleic acids.

[0028] In one embodiment, the invention provides a test kit for monitoring the efficacy of a compound or therapeutic in cancer cells or tissues, comprising an antibody specific for a protein. In certain embodiments, the kit further includes instructions for using the kit. In certain embodiments, the kit may further include solutions for suspending or fixing the cells, detectable tags or labels, solutions for rendering a polypeptide susceptible to the binding of an antibody, solutions for lysing cells, or solutions for the purification of polypeptides.

[0029] This invention is also related to methods of identifying biomarkers comprising the steps of selecting a set of biomarker genes from a gene expression profile representing a disease or drug treatment.

### DETAILED DESCRIPTION OF THE INVENTION

[0030] It is to be understood that this invention is not limited to the particular methodology, protocols, cell lines, animal species or genera, constructs, and reagents described and as such may vary. It is also to be understood that the terminology used herein is for the purpose of describing particular embodiments only, and is not intended to limit the scope of the present invention which will be limited only by the appended claims.

[0031] It must be noted that as used herein and in the appended claims, the singular forms “a,” “and,” and “the” include plural reference unless the context clearly dictates otherwise. Thus, for example, reference to “a gene” is a reference to one or more genes and includes equivalents thereof known to those skilled in the art, and so forth.

[0032] Unless defined otherwise, all technical and scientific terms used herein have the same meaning as commonly understood to one of ordinary skill in the art to which this invention belongs. Although any methods, devices, and materials similar or equivalent to those described herein can be used in the practice or testing of the invention, the preferred methods, devices and materials are now described.

[0033] All publications and patents mentioned herein are hereby incorporated herein by reference for the purpose of describing and disclosing, for example, the constructs and methodologies that are described in the publications which might be used in connection with the presently described invention. The publications discussed above and throughout the text are provided solely for their disclosure prior to the filing date of the present application. Nothing herein is to be construed as an admission that the inventors are not entitled to antedate such disclosure by virtue of prior invention.

### DEFINITIONS

[0034] For convenience, the meaning of certain terms and phrases employed in the specification, examples, and appended claims are provided below.

[0035] The phrase “a corresponding normal cell of” or “normal cell corresponding to” or “normal counterpart cell of” a diseased cell refers to a normal cell of the same type as that of the diseased cell.

[0036] An “address” on an array (e.g., a microarray) refers to a location at which an element, for example, an oligonucleotide, is attached to the solid surface of the array.

[0037] The term “agonist,” as used herein, is meant to refer to an agent that mimics or up-regulates (e.g., potentiates or supplements) the bioactivity of a protein. An agonist may be a wild-type protein or derivative thereof having at least one bioactivity of the wild-type protein. An agonist may also be a compound that up-regulates expression of a gene or which increases at least one bioactivity of a protein. An agonist can also be a compound which increases the interaction of a polypeptide with another molecule, for example, a target peptide or nucleic acid.

[0038] “Amplification,” as used herein, relates to the production of additional copies of a nucleic acid sequence. For example, amplification may be carried out using polymerase chain reaction (PCR) technologies which are well known in the art. (see, e.g., Dieffenbach, C. W. and G. S. Dveksler (1995) PCR Primer, A Laboratory Manual, Cold Spring Harbor Press, Plainview, N.Y.)

[0039] “Antagonist,” as used herein, is meant to refer to an agent that down-regulates (e.g., suppresses or inhibits) at least one bioactivity of a protein. An antagonist may be a compound which inhibits or decreases the interaction between a protein and another molecule, for example, a target peptide or enzyme substrate. An antagonist may also be a compound that down-regulates expression of a gene or which reduces the amount of expressed protein present.

[0040] The term “antibody,” as used herein, is intended to include whole antibodies, for example, of any isotype (IgG, IgA, IgM, IgE, etc.), and includes fragments thereof which are also specifically reactive with a vertebrate (e.g., mammalian) protein. Antibodies may be fragmented using conventional techniques and the fragments screened for utility in the same manner as described above for whole antibodies. Thus, the term includes segments of proteolytically-cleaved or recombinantly-prepared portions of an antibody molecule that are capable of selectively reacting with a certain protein. Non-limiting examples of such proteolytic and/or recombinant fragments include Fab, F(ab′)2, Fab′, Fv, and single chain antibodies (scFv) containing a V[L] and/or V[H] domain joined by a peptide linker. The scFv's may be covalently or non-covalently linked to form antibodies having two or more binding sites. The subject invention includes polyclonal, monoclonal, or other purified preparations of antibodies and recombinant antibodies.

[0041] The terms “array” or “matrix” refer to an arrangement of addressable locations or “addresses” on a device. The locations can be arranged in two-dimensional arrays, three-dimensional arrays, or other matrix formats. The number of locations may range from several to at least hundreds of thousands. Most importantly, each location represents a totally independent reaction site. A “nucleic acid array” refers to an array containing nucleic acid probes, such as oligonucleotides or larger portions of genes. The nucleic acid on the array may be single-stranded. Arrays wherein the probes are oligonucleotides are referred to as “oligonucleotide arrays” or “oligonucleotide chips.” A “microarray,” also referred to herein as a “biochip” or “biological chip,” is an array of regions having a density of discrete regions of at least about 100/cm², or at least about 1000/cm². The regions in a microarray have typical dimensions, for example, diameters, in the range of between about 10-250 μm, and are separated from other regions in the array by about the same distance.

[0042] “Biological activity,” “bioactivity,” “activity,” or “biological function,” which are used interchangeably, herein mean an effector or antigenic function that is directly or indirectly performed by a polypeptide (whether in its native or denatured conformation), or by any subsequence thereof. Biological activities include binding to polypeptides, binding to other proteins or molecules, activity as a DNA binding protein, as a transcription regulator, ability to bind damaged DNA, etc. A bioactivity can be modulated by directly affecting the subject polypeptide. Alternatively, a bioactivity can be altered by modulating the level of the polypeptide, such as by modulating expression of the corresponding gene.

[0043] The term “biological sample,” as used herein, refers to a sample obtained from an organism or from components (e.g., cells) of an organism. The sample may be of any biological tissue or fluid. The sample may be a “clinical sample” which is a sample derived from a patient. Such samples include, but are not limited to, sputum, blood, blood cells (e.g., white cells), tissue or fine needle biopsy samples, urine, peritoneal fluid, and pleural fluid, or cells therefrom. Biological samples may also include sections of tissues such as frozen sections taken for histological purposes.

[0044] The term “biomarker” or “marker” encompasses a broad range of intra- and extra-cellular events as well as whole-organism physiological changes. Biomarkers may be represent essentially any aspect of cell function, for example, but not limited to, levels or rate of production of signaling molecules, transcription factors, metabolites, gene transcripts as well as post-translational modifications of proteins. Biomarkers may include whole genome analysis of transcript levels or whole proteome analysis of protein levels and/or modifications.

[0045] A biomarker may also refer to a gene or gene product which is up- or down-regulated in a compound-treated, diseased cell of a subject having the disease compared to an untreated diseased cell. That is, the gene or gene product is sufficiently specific to the treated cell that it may be used, optionally with other genes or gene products, to identify, predict, or detect efficacy of a small molecule. Thus, a biomarker is a gene or gene product that is characteristic of efficacy of a compound in a diseased cell or the response of that diseased cell to treatment by the compound.

[0046] A nucleotide sequence is “complementary” to another nucleotide sequence if each of the bases of the two sequences match, that is, are capable of forming Watson-Crick base pairs. The term “complementary strand” is used herein interchangeably with the term “complement.” The complement of a nucleic acid strand may be the complement of a coding strand or the complement of a non-coding strand.

[0047] “Detection agents of genes” refers to agents that can be used to specifically detect the gene or other biological molecules relating to it, for example, RNA transcribed from the gene or polypeptides encoded by the gene. Exemplary detection agents are nucleic acid probes, which hybridize to nucleic acids corresponding to the gene, and antibodies.

[0048] “Differential gene expression pattern” between cell A and cell B refers to a pattern reflecting the differences in gene expression between cell A and cell B. A differential gene expression pattern may also be obtained between a cell at one time point and a cell at another time point, or between a cell incubated or contacted with a compound and a cell that has not been incubated with or contacted with the compound.

[0049] The term “cancer” includes, but is not limited to, solid tumors, such as cancers of the breast, respiratory tract, brain, reproductive organs, digestive tract, urinary tract, eye, liver, skin, head and neck, thyroid, parathyroid, and their distant metastases. The term also includes lymphomas, sarcomas, and leukemias.

[0050] Examples of breast cancer include, but are not limited to, invasive ductal carcinoma, invasive lobular carcinoma, ductal carcinoma in situ, and lobular carcinoma in situ.

[0051] Examples of cancers of the respiratory tract include, but are not limited to, small-cell and non-small-cell lung carcinoma, as well as bronchial adenoma and pleuropulmonary blastoma.

[0052] Examples of brain cancers include, but are not limited to, brain stem and hypophtalmic glioma, cerebellar and cerebral astrocytoma, medulloblastoma, ependymoma, as well as neuroectodermal and pineal tumor.

[0053] Tumors of the male reproductive organs include, but are not limited to, prostate and testicular cancer. Tumors of the female reproductive organs include, but are not limited to, endometrial, cervical, ovarian, vaginal, and vulvar cancer, as well as sarcoma of the uterus.

[0054] Tumors of the digestive tract include, but are not limited to, anal, colon, colorectal, esophageal, gallbladder, gastric, pancreatic, rectal, small-intestine, and salivary gland cancers.

[0055] Tumors of the urinary tract include, but are not limited to, bladder, penile, kidney, renal pelvis, ureter, and urethral cancers.

[0056] Eye cancers include, but are not limited to, intraocular melanoma and retinoblastoma.

[0057] Examples of liver cancers include, but are not limited to, hepatocellular carcinoma (liver cell carcinomas with or without fibrolamellar variant), cholangiocarcinoma (intrahepatic bile duct carcinoma), and mixed hepatocellular cholangiocarcinoma.

[0058] Skin cancers include, but are not limited to, squamous cell carcinoma, Kaposi's sarcoma, malignant melanoma, Merkel cell skin cancer, and non-melanoma skin cancer.

[0059] Head-and-neck cancers include, but are not limited to, laryngeal/hypopharyngeal/nasopharyngeal/oropharyngeal cancer, and lip and oral cavity cancer.

[0060] Lymphomas include, but are not limited to, AIDS-related lymphoma, non-Hodgkin's lymphoma, cutaneous T-cell lymphoma, Hodgkin's disease, and lymphoma of the central nervous system.

[0061] Sarcomas include, but are not limited to, sarcoma of the soft tissue, osteosarcoma, malignant fibrous histiocytoma, lymphosarcoma, and rhabdomyosarcoma.

[0062] Leukemias include, but are not limited to, acute myeloid leukemia, acute lymphoblastic leukemia, chronic lymphocytic leukemia, chronic myelogenous leukemia, and hairy cell leukemia.

[0063] “A diseased cell of cancer” refers to a cell present in subjects having cancer. That is, a cell which is a modified form of a normal cell and is not present in a subject not having cancer, or a cell which is present in significantly higher or lower numbers in subjects having cancer relative to subjects not having cancer.

[0064] The term “equivalent” is understood to include nucleotide sequences encoding functionally equivalent polypeptides. Equivalent nucleotide sequences may include sequences that differ by one or more nucleotide substitutions, additions, or deletions, such as allelic variants; and may, therefore, include sequences that differ from the nucleotide sequence of the nucleic acids referred to in the Tables due to the degeneracy of the genetic code.

[0065] The term “expression profile,” which is used interchangeably herein with “gene expression profile” and “fingerprint” of a cell refers to a set of values representing mRNA levels of one or more genes in a cell. An expression profile may comprise values representing expression levels of at least about 10 genes, or at least about 50, 100, 200 or more genes. Expression profiles may also comprise an mRNA level of a gene which is expressed at similar levels in multiple cells and conditions (e.g., a housekeeping gene such as GAPDH). For example, an expression profile of a diseased cell of cancer refers to a set of values representing mRNA levels of 10 or more genes in a diseased cell.

[0066] The term “gene” refers to a nucleic acid sequence that comprises control and coding sequences necessary for the production of a polypeptide or precursor. The polypeptide can be encoded by a full length coding sequence or by any portion of the coding sequence. The gene may be derived in whole or in part from any source known to the art, including a plant, a fungus, an animal, a bacterial genome or episome, eukaryotic, nuclear or plasmid DNA, cDNA, viral DNA, or chemically synthesized DNA. A gene may contain one or more modifications in either the coding or the untranslated regions which could affect the biological activity or the chemical structure of the expression product, the rate of expression, or the manner of expression control. Such modifications include, but are not limited to, mutations, insertions, deletions, and substitutions of one or more nucleotides. The gene may constitute an uninterrupted coding sequence or it may include one or more introns, bound by the appropriate splice junctions.

[0067] “Hybridization” refers to any process by which a strand of nucleic acid binds with a complementary strand through base pairing. For example, two single-stranded nucleic acids “hybridize” when they form a double-stranded duplex. The region of double-strandedness may include the full-length of one or both of the single-stranded nucleic acids, or all of one single-stranded nucleic acid and a subsequence of the other single-stranded nucleic acid, or the region of double-strandedness may include a subsequence of each nucleic acid. Hybridization also includes the formation of duplexes which contain certain mismatches, provided that the two strands are still forming a double-stranded helix. “Stringent hybridization conditions” refers to hybridization conditions resulting in essentially specific hybridization.

[0068] The term “isolated,” as used herein, with respect to nucleic acids, such as DNA or RNA, refers to molecules separated from other DNAs or RNAs, respectively, that are present in the natural source of the macromolecule. The term “isolated” as used herein also refers to a nucleic acid or peptide that is substantially free of cellular material, viral material, culture medium when produced by recombinant DNA techniques, or chemical precursors or other chemicals when chemically synthesized. Moreover, an “isolated nucleic acid” may include nucleic acid fragments which are not naturally occurring as fragments and would not be found in the natural state. The term “isolated” is also used herein to refer to polypeptides which are isolated from other cellular proteins and is meant to encompass both purified and recombinant polypeptides.

[0069] As used herein, the terms “label” and “detectable label” refer to a molecule capable of detection, including, but not limited to, radioactive isotopes, fluorophores, chemiluminescent moieties, enzymes, enzyme substrates, enzyme cofactors, enzyme inhibitors, dyes, metal ions, ligands (e.g., biotin or haptens), and the like. The term “fluorescer” refers to a substance or a portion thereof which is capable of exhibiting fluorescence in the detectable range. Particular examples of labels which may be used in the present invention include fluorescein, rhodamine, dansyl, umbelliferone, Texas red, luminol, NADPH, alpha-beta-galactosidase, and horseradish peroxidase.

[0070] The phrase “level of expression” refers to the level of mRNA, as well as pre-mRNA nascent transcript(s), transcript processing intermediates, mature mRNA(s), and degradation products, encoded by a gene in the cell. The phrase “level of expression” also refers to the level of protein or polypeptide in a cell.

[0071] As used herein, the term “nucleic acid” refers to polynucleotides such as deoxyribonucleic acid (DNA) and, where appropriate, ribonucleic acid (RNA). The term should also be understood to include, as equivalents, analogs of either RNA or DNA made from nucleotide analogs and, as applicable to the embodiment being described, single-stranded (sense or antisense) and double-stranded polynucleotides. Chromosomes, cDNAs, mRNAs, rRNAs, and ESTs are representative examples of molecules that may be referred to as nucleic acids.

[0072] The phrase “nucleic acid corresponding to a gene” refers to a nucleic acid that can be used for detecting the gene, for example, a nucleic acid which is capable of hybridizing specifically to the gene.

[0073] The phrase “nucleic acid sample derived from RNA” refers to one or more nucleic acid molecules (e.g., RNA or DNA) that may be synthesized from the RNA, and includes DNA produced from methods using PCR (e.g., RT-PCR).

[0074] The term “oligonucleotide” as used herein refers to a nucleic acid molecule comprising, for example, from about 10 to about 1000 nucleotides. Oligonucleotides for use in the present invention may be from about 15 to about 150 nucleotides, or from about 150 to about 1000 in length. The oligonucleotide may be a naturally occurring oligonucleotide or a synthetic oligonucleotide. Oligonucleotides may be prepared by the phosphoramidite method (Beaucage and Carruthers, Tetrahedron Lett. 22:1859-62, 1981), or by the triester method (Matteucci, et al., J. Am. Chem. Soc. 103:3185, 1981), or by other chemical methods known in the art.

[0075] The term “patient” or “subject” as used herein includes mammals (e.g., humans and animals).

[0076] The term “percent identical” refers to sequence identity between two amino acid sequences or between two nucleotide sequences. For example, identity between two sequences may be determined by comparing a particular position in each sequence which may be aligned for purposes of comparison. When an equivalent position in the compared sequences is occupied by the same base or amino acid, then the molecules are identical at that position. When the equivalent site is occupied by the same or a similar amino acid residue (e.g., similar in steric and/or electronic nature), then the molecules may be referred to as homologous (similar) at that position. Expression as a percentage of homology, similarity, or identity refers to a function of the number of identical or similar amino acids at positions shared by the compared sequences. Various alignment algorithms and/or programs may be used including, for example, FASTA, BLAST, or ENTREZ. FASTA and BLAST are available as a part of the GCG sequence analysis package (University of Wisconsin, Madison, Wis.), and may be used with, for example, default settings. ENTREZ is available through the National Center for Biotechnology Information, National Library of Medicine, National Institutes of Health, Bethesda, Md. In one embodiment, the percent identity of two sequences may be determined by the GCG program with a gap weight of 1 (e.g., each amino acid gap is weighted as if it were a single amino acid or nucleotide mismatch between the two sequences). Other techniques for alignment are described in Methods in Enzymology (vol. 266: Computer Methods for Macromolecular Sequence Analysis (1996), ed. Doolittle, Academic Press, Inc., a division of Harcourt Brace & Co., San Diego, Calif., USA). An alignment program that permits gaps in the sequence may be utilized to align the sequences. For example, the Smith-Waterman is one type of algorithm that permits gaps in sequence alignments (see, e.g., Meth. Mol. Biol. 70:173-187, 1997). Also, the GAP program using the Needleman and Wunsch alignment method may be utilized to align sequences. An alternative search strategy uses MPSRCH software, which runs on a MASPAR computer. MPSRCH uses a Smith-Waterman algorithm to score sequences on a massively parallel computer. This approach improves the ability to detect distantly related matches, and is especially tolerant of small gaps and nucleotide sequence errors. Nucleic acid-encoded amino acid sequences may be used to search both protein and DNA databases. Databases with individual sequences are described in Methods in Enzymology, ed. Doolittle, supra. Databases include, for example, Genbank, EMBL, and DNA Database of Japan (DDBJ).

[0077] As used herein, a nucleic acid or other molecule attached to an array is referred to as a “probe” or “capture probe.” When an array contains several probes corresponding to one gene, these probes are referred to as a “gene-probe set.” A gene-probe set may consist of, for example, about 2 to about 20 probes, from about 2 to about 10 probes, or about 5 probes.

[0078] The “profile” of a cell's biological state refers to the levels of various constituents of a cell that are known to change in response to drug treatments and other perturbations of the biological state of the cell. Constituents of a cell include, for example, levels of RNA, levels of protein abundances, or protein activity levels.

[0079] The term “protein,” “polypeptide,” and “peptide” are used interchangeably herein when referring to a gene product.

[0080] An expression profile in one cell is “similar” to an expression profile in another cell when the level of expression of the genes in the two profiles are sufficiently similar that the similarity is indicative of a common characteristic, for example, the same type of cell. Accordingly, the expression profiles of a first cell and a second cell are similar when at least 75% of the genes that are expressed in the first cell are expressed in the second cell at a level that is within a factor of two relative to the first cell.

[0081] “Small molecule,” as used herein, refers to a composition with a molecular weight of less than about 5 kD or less than about 4 kD. Small molecules can be nucleic acids, peptides, polypeptides, peptidomimetics, carbohydrates, lipids, or other organic or inorganic molecules. Many pharmaceutical companies have extensive libraries of chemical and/or biological mixtures, often fungal, bacterial, or algal extracts, which can be screened with any of the assays of the invention to identify compounds that modulate a bioactivity.

[0082] The term “specific hybridization” of a probe to a target site of a template nucleic acid refers to hybridization of the probe predominantly to the target, such that the hybridization signal can be clearly interpreted. As further described herein, such conditions resulting in specific hybridization vary depending on the length of the region of homology, the GC content of the region, and the melting temperature (“Tm”) of the hybrid. Thus, hybridization conditions may vary in salt content, acidity, and temperature of the hybridization solution and the washes.

[0083] A “variant” of polypeptide refers to a polypeptide having an amino acid sequence in which one or more amino acid residues is altered. The variant may have “conservative” changes, wherein a substituted amino acid has similar structural or chemical properties (e.g., replacement of leucine with isoleucine). A variant may also have “nonconservative” changes (e.g., replacement of glycine with tryptophan). Analogous minor variations may include amino acid deletions or insertions, or both. Guidance in determining which amino acid residues may be substituted, inserted, or deleted without abolishing biological or immunological activity may be identified using computer programs well known in the art, for example, LASERGENE software (DNASTAR).

[0084] The term “variant,” when used in the context of a polynucleotide sequence, may encompass a polynucleotide sequence related to that of a particular gene or the coding sequence thereof. This definition may also include, for example, “allelic,” “splice,” “species,” or “polymorphic” variants. A splice variant may have significant identity to a reference molecule, but will generally have a greater or lesser number of polynucleotides due to alternate splicing of exons during mRNA processing. The corresponding polypeptide may possess additional functional domains or an absence of domains. Species variants are polynucleotide sequences that vary from one species to another. The resulting polypeptides generally will have significant amino acid identity relative to each other. A polymorphic variant is a variation in the polynucleotide sequence of a particular gene between individuals of a given species. Polymorphic variants also may encompass “single nucleotide polymorphisms” (SNPs) in which the polynucleotide sequence varies by one base. The presence of SNPs may be indicative of, for example, a certain population, a disease state, or a propensity for a disease state.

Microarrays for Determining the Level of Expression of Genes Characteristic of Human Lung Tumor Tissue

[0085] Generally, determining expression profiles with microarrays involves the following steps: (a) obtaining an mRNA sample from a subject and preparing labeled nucleic acids therefrom (the “target nucleic acids” or “targets”); (b) contacting the target nucleic acids with an array under conditions sufficient for the target nucleic acids to bind to the corresponding probes on the array, for example, by hybridization or specific binding; (c) optional removal of unbound targets from the array; (d) detecting the bound targets, and (e) analyzing the results, for example, using computer based analysis methods. As used herein, “nucleic acid probes” or “probes” are nucleic acids attached to the array, whereas “target nucleic acids” are nucleic acids that are hybridized to the array. Each of these steps is described in more detail below.

[0086] Nucleic acid specimens may be obtained from an individual to be tested using either “invasive” or “non-invasive” sampling means. A sampling means is said to be “invasive” if it involves the collection of nucleic acids from within the skin or organs of an animal (including murine, human, ovine, equine, bovine, porcine, canine, or feline animal). Examples of invasive methods include blood collection, semen collection, needle biopsy, pleural aspiration, umbilical cord biopsy, etc. Examples of such methods are discussed by Kim, et al., (J. Virol. 66:3879-3882, 1992); Biswas, et al., (Ann. NY Acad. Sci. 590:582-583, 1990); and Biswas, et al., (J. Clin. Microbiol. 29:2228-2233, 1991).

[0087] In contrast, a “non-invasive” sampling means is one in which the nucleic acid molecules are recovered from an internal or external surface of the animal. Examples of such “non-invasive” sampling means include, for example, “swabbing,” collection of tears, saliva, urine, fecal material, sweat or perspiration, hair, etc.

[0088] In one embodiment of the present invention, one or more cells from the subject to be tested are obtained and RNA is isolated from the cells. In one embodiment, a sample of peripheral blood leukocytes (PBLs) cells is obtained from the subject. It is also possible to obtain a cell sample from a subject, and then to enrich the sample for a desired cell type. For example, cells may be isolated from other cells using a variety of techniques, such as isolation with an antibody binding to an epitope on the cell surface of the desired cell type. Where the desired cells are in a solid tissue, particular cells may be dissected, for example, by microdissection or by laser capture microdissection (LCM) (see, e.g., Bonner, et al., Science 278:1481, 1997; Emmert-Buck, et al., Science 274:998, 1996; Fend, et al., Am. J. Path. 154:61, 1999; and Murakami, et al., Kidney Int. 58:1346, 2000).

[0089] RNA may be extracted from tissue or cell samples by a variety of methods, for example, guanidium thiocyanate lysis followed by CsCl centrifugation (Chirgwin, et al., Biochemistry 18:5294-5299, 1979). RNA from single cells may be obtained as described in methods for preparing cDNA libraries from single cells (see, e.g., Dulac, Curr. Top. Dev. Biol. 36:245, 1998; Jena, et al., J. Immunol. Methods 190:199, 1996).

[0090] The RNA sample can be further enriched for a particular species. In one embodiment, for example, poly(A)+ RNA may be isolated from an RNA sample. In particular, poly-T oligonucleotides may be immobilized on a solid support to serve as affinity ligands for mRNA. Kits for this purpose are commercially available, for example, the MessageMaker kit (Life Technologies, Grand Island, N.Y.).

[0091] In one embodiment, the RNA population may be enriched for sequences of interest, such as the genes characteristic of human lung tumor tissue (e.g., SEQ ID NOs: 1, 3, 5, 7, 9, 11, 13, 15, 17, 19, 21, 23, 25, 27, 29, 31, 33, 35, 37, 39, 41, 43, 45, 47, 49, 51, 53, 55, 57, 59, 61, 63, 65, 67, 69, 71, 73, 74, 76, 78, 80, 82, 84, 86, 88, 90, 92, 94, 96, 98, 100, 102, 104, 106, 108, 110, 112, 114, 116, 118, 120, 122, 124, 126, 128, 130, 132, 134, 136, 138, 140, 142, 144, 146, 148, 150, 152, 154, 156, 158, 160, 162, 164, 166, 168, 170, 172, 174, 176, 178, 180, 182, 184, 186, 188, 190, 192, 194, 196, 198, 200, 202, 204, 206, 208, 210, 212, 214, 216, 218, 220, 222, 224, 226, 228, 230, 232, 234, 236, 238, 240, 242, 244, 246, 248, 250, 252, 254, 256, 258, 260, 262, 264, 266, 268, 270, 272, 274, 276, 278, 280, 282, 284, 286, 288, 290, 292, 294, 296, 298, 300, 302, 304, 306, 308, 310, 312, 314, 316, 318, 320, 322, 324, 326, 328, 330, 332, 334, 336, 338, 340, 342, 344, 346, 348, 350, 353, 355, 357, 359, 361, 363, 365, 367, 369, 371, 373, 375, 377, 379, 381, 383, 385, 387, 389, 391, 393, 395, 397, 399). Enrichment may be accomplished, for example, by primer-specific cDNA synthesis, or multiple rounds of linear amplification based on cDNA synthesis and template-directed in vitro transcription (see, e.g., Wang, et al., Proc. Natl. Acad. Sci. USA 86:9717, 1989; Dulac, et al., supra; Jena, et al., supra).

[0092] The population of RNA, enriched or not in particular species or sequences, may be further amplified. Such amplification is particularly important when using RNA from a single cell or a few cells. A variety of amplification methods are suitable for use in the methods of the present invention, including, for example, PCR; ligase chain reaction (LCR) (see, e.g. Wu and Wallace, Genomics 4:560, 1989; Landegren, et al., Science 241:1077, 1988); self-sustained sequence replication (SSR) (see, e.g., Guatelli, et al., Proc. Natl. Acad. Sci. USA 87:1874, 1990); nucleic acid based sequence amplification (NASBA) and transcription amplification (see, e.g., Kwoh, et al., Proc. Natl. Acad. Sci. USA 86:1173, 1989). Methods for PCR technology are well known in the art (see, e.g., PCR Technology: Principles and Applications for DNA Amplification (ed. H. A. Erlich, Freeman Press, N.Y., N.Y., 1992); PCR Protocols: A Guide to Methods and Applications (eds. Innis, et al., Academic Press, San Diego, Calif., 1990); Mattila, et al., Nucleic Acids Res. 19:4967, 1991; Eckert, et al., PCR Methods and Applications 1:17, 1991; PCR (eds. McPherson, et al., IRL Press, Oxford); and U.S. Pat. No. 4,683,202). Methods of amplification are described, for example, by Ohyama, et al., (BioTechniques 29:530, 2000); Luo, et al., (Nat. Med. 5:117, 1999); Hegde, et al., (BioTechniques 29:548, 2000); Kacharmina, et al., (Meth. Enzymol. 303:3, 1999); Livesey, et al., Curr. Biol. 10:301, 2000); Spirin, et al., (Invest. Ophtalmol. Vis. Sci. 40:3108, 1999); and Sakai, et al., (Anal. Biochem. 287:32, 2000). RNA amplification and cDNA synthesis may also be conducted in cells in situ (see, e.g., Eberwine, et al. Proc. Natl. Acad. Sci. USA 89:3010, 1992).

[0093] Generally, the target molecules will be labeled to permit detection of hybridization of the target molecules to a microarray. That is, the probe may comprise a member of a signal producing system and thus, is detectable, either directly or through combined action with one or more additional members of a signal producing system. Examples of directly detectable labels include isotopic and fluorescent moieties incorporated, usually by a covalent bond, into a moiety of the probe, such as a nucleotide monomeric unit (e.g., dNMP of the primer), or a photoactive or chemically active derivative of a detectable label which can be bound to a functional moiety of the probe molecule.

[0094] Nucleic acids may be labeled during or after enrichment and/or amplification of RNAs. For example, reverse transcription may be carried out in the presence of a dNTP conjugated to a detectable label, for example, a fluorescently labeled DNTP. In another embodiment, the cDNA or RNA probe may be synthesized in the absence of detectable label and may be labeled subsequently, for example, by incorporating biotinylated dNTPs or rNTP, or some similar means (e.g., photo-cross-linking a psoralen derivative of biotin to RNAs), followed by addition of labeled streptavidin (e.g., phycoerythrin-conjugated streptavidin) or the equivalent.

[0095] Fluorescent moieties or labels of interest include coumarin and its derivatives (e.g., 7-amino-4-methylcoumarin, aminocoumarin); bodipy dyes such as Bodipy FL and cascade blue; fluorescein and its derivatives (e.g., fluorescein isothiocyanate, Oregon green); rhodamine dyes (e.g., Texas red, tetramethylrhodamine); eosins and erythrosins; cyanine dyes (e.g., Cy2, Cy3, Cy3.5, Cy5, Cy5.5, Cy7); FluorX, macrocyclic chelates of lanthanide ions (e.g., quantum dye™); fluorescent energy transfer dyes such as thiazole orange-thidium heterodiimer, TOTAB, dansyl, etc. Individual fluorescent compounds which have functionalities for linking to an element desirably detected in an apparatus or assay of the invention, or which may be modified to incorporate such functionalities may also be utilized (see, e.g., Kricka, 1992, Nonisotopic DNA Probe Techniques, Academic Press San Diego, Calif.).

[0096] Chemiluminescent labels include luciferin and 2,3-dihydrophthalazinediones, for example, luminol.

[0097] Labels may also be members of a signal producing system that act in concert with one or more additional members of the same system to provide a detectable signal. Illustrative of such labels are members of a specific binding pair, such as ligands, for example, biotin, fluorescein, digoxigenin, antigen, polyvalent cations, chelator groups and the like. Members may specifically bind to additional members of the signal producing system, and the additional members may provide a detectable signal either directly or indirectly, for example, an antibody conjugated to a fluorescent moiety or an enzymatic moiety capable of converting a substrate to a chromogenic product (e.g., alkaline phosphatase conjugate antibody and the like).

[0098] Additional labels of interest include those that provide a signal only when the probe with which it is associated is specifically bound to a target molecule. Such labels include “molecular beacons” as described in Tyagi and Kramer (Nature Biotech. 14:303, 1996) and EP 0 070 685 B1. Other labels of interest include those described in U.S. Pat. No. 5,563,037; WO 97/17471; and WO 97/17076.

[0099] In other embodiments, the target nucleic acid may not be labeled. In this case, hybridization may be determined, for example, by plasmon resonance (see, e.g., Thiel, et al. Anal. Chem. 69:4948, 1997).

[0100] In one embodiment, a plurality (e.g., 2, 3, 4, 5, or more) of sets of target nucleic acids are labeled and used in one hybridization reaction (“multiplex” analysis). For example, one set of nucleic acids may correspond to RNA from one cell and another set of nucleic acids may correspond to RNA from another cell. The plurality of sets of nucleic acids may be labeled with different labels, for example, different fluorescent labels (e.g., fluorescein and rhodamine) which have distinct emission spectra so that they can be distinguished. The sets may then be mixed and hybridized simultaneously to one microarray (see, e.g., Shena, et al., Science 270:467-470, 1995).

[0101] Examples of distinguishable labels for use when hybridizing a plurality of target nucleic acids to one array are well known in the art and include: two or more different emission wavelength fluorescent dyes such as Cy3 and Cy5; combination of fluorescent proteins and dyes such as phicoerythrin and Cy5; two or more isotopes with different energy of emission such as ³²P and ³³P; gold or silver particles with different scattering spectra; labels which generate signals under different treatment conditions such as temperature, pH, treatment with additional chemical agents, etc.; or generate signals at different time points after treatment. Using one or more enzymes for signal generation allows for the use of an even greater variety of distinguishable labels, based on different substrate specificity of enzymes (e.g., alkaine phosphatase/peroxidase).

[0102] The quality of labeled nucleic acids may be evaluated prior to hybridization to an array. In one embodiment, the GeneChip® Test3 Array from Affymetrix (Santa Clara, Calif.) may be used for that purpose. This array contains probes representing a subset of characterized genes from several organisms including mammals. Thus, the quality of a labeled nucleic acid sample can be determined by hybridization of a fraction of the sample to an array.

[0103] Microarrays for use according to the invention include one or more probes of genes characteristic of human lung tumor tissue. In one embodiment, the microarray comprises probes corresponding to one or more of genes selected from the group consisting of genes which are up-regulated in cancer and genes which are down-regulated in cancer. The microarray may comprise probes corresponding to at least 10, at least 20, at least 50, at least 100 or at least 1000 genes characteristic of human lung tumor tissue. The microarray may comprise probes corresponding to each gene listed in the Tables.

[0104] There may be one or more than one probe corresponding to each gene on a microarray. For example, a microarray may contain from 2 to 20 probes corresponding to one gene or about 5 to 10. The probes may correspond to the full-length RNA sequence or complement thereof of genes characteristic of human lung tumor tissue, or the probe may correspond to a portion thereof, which portion is of sufficient length to permit specific hybridization. Such probes may comprise from about 50 nucleotides to about 100, 200, 500, or 1000 nucleotides or more than 1000 nucleotides. As further described herein, microarrays may contain oligonucleotide probes, consisting of about 10 to 50 nucleotides, about 15 to 30 nucleotides, or about 20-25 nucleotides. The probes are may be single-stranded and will have sufficient complementarity to its target to provide for the desired level of sequence specific hybridization.

[0105] Typically, the arrays used in the present invention will have a site density of greater than 100 different probes per cm². The arrays may have a site density of, for example, greater than 500/cm², greater than about 1000/cm², or greater than about 10,000/cm². The arrays may have, for example, more than 100 different probes on a single substrate, greater than about 1000 different probes, greater than about 10,000 different probes, or greater than 100,000 different probes on a single substrate.

[0106] A number of different microarray configurations and methods for their production are known to those of skill in the art and are disclosed in U.S. Pat. Nos: 5,242,974; 5,384,261; 5,405,783; 5,412,087; 5,424,186; 5,429,807; 5,436,327; 5,445,934; 5,556,752; 5,405,783; 5,412,087; 5,424,186; 5,429,807; 5,436,327; 5,472,672; 5,527,681; 5,529,756; 5,545,531; 5,554,501; 5,561,071; 5,571,639; 5,593,839; 5,624,711; 5,700,637; 5,744,305; 5,770,456; 5,770,722; 5,837,832; 5,856,101; 5,874,219; 5,885,837; 5,919,523; 6,022,963; 6,077,674; and 6,156,501; Shena, et al., Tibtech 16:301, 1998; Duggan, et al., Nat. Genet. 21:10, 1999; Bowtell, et al., Nat. Genet. 21:25, 1999; Lipshutz, et al., 21 Nature Genet. 20-24, 1999; Blanchard, et al., 11 Biosensors and Bioelectronics, 687-90, 1996; Maskos, et al., 21 Nucleic Acids Res. 4663-69, 1993; Hughes, et al., Nat. Biotechol. 19:342, 2001; the disclosures of which are herein incorporated by reference. Patents describing methods of using arrays in various applications include: U.S. Pat. Nos. 5,143,854; 5,288,644; 5,324,633; 5,432,049; 5,470,710; 5,492,806; 5,503,980; 5,510,270; 5,525,464; 5,547,839; 5,580,732; 5,661,028; 5,848,659; and 5,874,219; the disclosures of which are herein incorporated by reference.

[0107] Arrays may also include control and reference nucleic acids. Control nucleic acids include, for example, prokaryotic genes such as bioB, bioC and bioD, cre from P1 bacteriophage or polyA controls, such as dap, lys, phe, thr, and trp. Reference nucleic acids allow the normalization of results from one experiment to another and the comparison of multiple experiments on a quantitative level. Exemplary reference nucleic acids include housekeeping genes of known expression levels, for example, GAPDH, hexokinase, and actin.

[0108] In one embodiment, an array of oligonucleotides may be synthesized on a solid support. Exemplary solid supports include glass, plastics, polymers, metals, metalloids, ceramics, organics, etc. Using chip masking technologies and photoprotective chemistry, it is possible to generate ordered arrays of nucleic acid probes. These arrays, which are known, for example, as “DNA chips” or very large scale immobilized polymer arrays (“TLSIPS™” arrays), may include millions of defined probe regions on a substrate having an area of about 1 cm² to several cm², thereby incorporating from a few to millions of probes (see, e.g., U.S. Pat. No. 5,631,734).

[0109] A nucleic acid probe may be at least, for example, about 10, 15, 20, 25, 30, 50, 100 or more nucleotides, and may comprise the full-length gene. For example, probes may be those that hybridize specifically to the genes listed in the Tables.

[0110] Nucleic acid probes may be obtained, for example, by PCR amplificartion of gene segments from genomic, cDNA (e.g., RT-PCR), or cloned sequences. cDNA probes may be prepared according to methods known in the art and further described herein, for example, by reverse-transcription PCR (RT-PCR) of RNA using sequence specific primers. Sequences of genes or cDNA from which probes are generated may be obtained, for example, from GenBank, other public databases, or publications.

[0111] Oligonucleotide probes may also be synthesized by standard methods known in the art, for example, by automated DNA synthesizer or any other chemical method. As an example, phosphorothioate oligonucleotides may be synthesized by the method of Stein, et al., (Nucl. Acids Res. 16:3209, 1988), and methylphosphonate oligonucleotides may be prepared by controlled pore glass polymer supports (see, e.g., Sarin, et al., Proc. Natl. Acad. Sci. U.S.A. 85:7448-7451, 1988). In another embodiment, the oligonucleotide may be a 2′-)-methylribonucleotide (Inoue, et al., Nucl. Acids Res. 15:6131-6148, 1987), or a chimeric RNA-DNA analog (Inoue, et al., FEBS Lett. 215:327-330, 1987).

[0112] Nucleic acid probes may be natural nucleic acids or chemically modified nucleic acids (e.g., composed of nucleotide analogs); however, the probes should possess activated hydroxyl groups compatible with the linking chemistry. The protective groups may be photolabile, or the protective groups may be labile under certain chemical conditions (e.g., acid). The surface of the solid support may contain a composition that generates acids upon exposure to light. Thus, exposure of a region of the substrate to light generates acids in that region that remove the protective groups in the exposed region. Also, the synthesis method may use 3′-protected 5′-0-phosphoramidite-activated deoxynucleoside. In this case, the oligonucleotide is synthesized in the 5′ to 3′ direction, which results in a free 5′ end.

[0113] In one embodiment of the present invention, oligonucleotides of an array may be synthesized using a 96-well automated multiplex oligonucleotide synthesizer (A.M.O.S.) that is capable of producing thousands of oligonucleotides (see, e.g., Lashkari, et al., Proc. Natl. Acad. Sci. USA 93: 7912, 1995).

[0114] To compare expression levels, labeled nucleic acids may be contacted with the array under conditions sufficient for binding between the target nucleic acid and the probe on the array. In one embodiment, the hybridization conditions may be selected to provide for the desired level of hybridization specificity; that is, conditions sufficient for hybridization to occur between the labeled nucleic acids and probes on the microarray.

[0115] Hybridization may be carried out in conditions permitting essentially specific hybridization. The length and GC content of the nucleic acid will determine the thermal melting point and thus, the hybridization conditions necessary for obtaining specific hybridization of the probe to the target nucleic acid. These factors are well known to a person of skill in the art, and may also be tested in assays. An extensive guide to nucleic acid hybridization may be found in Tijssen, et al. (Laboratory Techniques in Biochemistry and Molecular Biology, Vol. 24: Hybridization With Nucleic Acid Probes, P. Tijssen, ed. Elsevier, N.Y., (1993)). Generally, stringent conditions may be selected to be about 5° C. lower than the thermal melting point (Tm) for the specific sequence at a defined ionic strength and pH. The Tm is the temperature (under defined ionic strength and pH) at which 50% of the target sequence hybridizes to a perfectly matched probe. Highly stringent conditions may be selected to be equal to the Tm point for a particular probe. Sometimes the term “dissociation temperature” (Td) is used to define the temperature at which at least half of the probe dissociates from a perfectly matched target nucleic acid. In any case, a variety of techniques for estimating the Tm or Td are available, and generally are described in Tijssen, supra. Typically, G-C base pairs in a duplex are estimated to contribute about 3° C. to the Tm, while A-T base pairs are estimated to contribute about 2° C., up to a theoretical maximum of about 80-100° C. However, more sophisticated models of Tm and Td are available in which G-C stacking interactions, solvent effects, the desired assay temperature, and the like are taken into account.

[0116] In one embodiment, non-specific binding or background signal may be reduced by the use of a detergent (e.g, C-TAB) or a blocking reagent (e.g., sperm DNA, cot-1 DNA, etc.) during the hybridization. In one embodiment, the hybridization may be performed in the presence of about 0.5 mg/mi DNA (e.g., herring sperm DNA). The use of blocking agents in hybridization is well known to those of skill in the art (see, e.g., Tijssen, supra).

[0117] If the target sequences are detected using the same label, different arrays may be employed for each physiological source or the same array may be screened multiple times. The above methods may be varied to provide for multiplex analysis by employing different and distinguishable labels for the different target populations (e.g., different physiological sources). According to this multiplex method, the same array may be used at the same time for each of the different target populations.

[0118] The methods described above result in the production of hybridization patterns of labeled target nucleic acids on the array surface. The resultant hybridization patterns of labeled nucleic acids may be visualized or detected in a variety of ways, with the particular manner of detection selected based on the particular label of the target nucleic acid. Representative detection means include scintillation counting, autoradiography, fluorescence measurement, colorimetric measurement, light emission measurement, light scattering, and the like.

[0119] One such method of detection utilizes an array scanner that is commercially available (Affymetrix, Santa Clara, Calif.), for example, the 417™ Arrayer, the 418™ Array Scanner, or the Agilent GeneArray™ Scanner. This scanner is controlled from a system computer with an interface and easy-to-use software tools. The output may be directly imported into or directly read by a variety of software applications. Scanning devices are described in, for example, U.S. Pat. Nos. 5,143,854 and 5,424,186.

[0120] For fluorescent labeled probes, the fluorescence emissions at each site of a transcript array may be detected by scanning confocal laser microscopy. Alternatively, a laser may be used that allows simultaneous specimen illumination at wavelengths specific to the two fluorophores and emissions from the two fluorophores may be analyzed simultaneously (see, e.g., Shalon, et al., Genome Res. 6:639-645, 1996). For example, the arrays may be scanned with a laser fluorescent scanner with a computer controlled X-Y stage and a microscope objective. Fluorescence laser scanning devices are described in Shalon, et al., supra.

[0121] Following the data gathering operation, the data will typically be reported to a data analysis operation. To facilitate the sample analysis operation, the data obtained by the reader from the device may be analyzed using a digital computer. Typically, the computer will be appropriately programmed for receipt and storage of the data from the device, as well as for analysis and reporting of the data gathered, for example, subtraction of the background, deconvolution of multi-color images, flagging or removing artifacts, verifying that controls have performed properly, normalizing the signals, interpreting fluorescence data to determine the amount of hybridized target, normalization of background and single base mismatch hybridizations, and the like.

[0122] In one embodiment, a system comprises a search function that allows one to search for specific patterns, for example, patterns relating to differential gene expression, for example, between the expression profile of a cancer cell and the expression profile of a counterpart normal cell in a subject. For example, a system allows one to search for patterns of gene expression between more than two samples.

[0123] Various algorithms are available for analyzing gene expression profile data, for example, the type of comparisons to perform. In certain embodiments, it is desirable to group genes that are co-regulated. This allows for the comparison of large numbers of profiles. One embodiment for identifying such groups of genes involves clustering algorithms (for reviews of clustering algorithms, see, e.g., Fukunaga, 1990, Statistical Pattern Recognition, 2nd Ed., Academic Press, San Diego; Everitt, 1974, Cluster Analysis, London: Heinemann Educ. Books; Hartigan, 1975, Clustering Algorithms, New York: Wiley; Sneath and Sokal, 1973, Numerical Taxonomy, Freeman; Anderberg, 1973, Cluster Analysis for Applications, Academic Press: New York).

[0124] Clustering may be based on other characteristics of the genes, for example, their level of expression (see, e.g., U.S. Pat. No. 6,203,987), or permit clustering of time curves (see, e.g. U.S. Pat. No. 6,263,287). Examples of clustering algorithms include K-means clustering and hierarchical clustering. Clustering may also be achieved by visual inspection of gene expression data using a graphical representation of the data (e.g. a “heat map”). An example of software which contains clustering algorithms and a means to graphically represent gene expression data is Spotfire DecisionSite (Spotfire, Inc., Somerville, Mass. and Goteborg, Sweden).

[0125] Comparison of the expression levels of one or more genes characteristic of human lung tumor tissue with reference expression levels, for example, expression levels in diseased cells of cancer or in normal counterpart cells, may be conducted using computer systems. In one embodiment, expression levels may be obtained from two cells and these two sets of expression levels may be introduced into a computer system for comparison. For example, one set of expression levels is entered into a computer system for comparison with values that are already present in the computer system, or in computer-readable form that is then entered into the computer system.

[0126] In one embodiment, the computer system may also contain a database comprising values representing levels of expression of one or more genes characteristic of human lung tumor tissue. The database may contain one or more expression profiles of genes characteristic of human lung tumor tissue in different cells.

[0127] In another embodiment, the invention provides a computer-readable form of the gene expression profile data, or of values corresponding to the level of expression of at least one gene characteristic of cancer in a diseased cell. The values may be mRNA expression levels obtained from experiments, for example, microarray analysis. The values may also be mRNA levels normalized relative to a reference gene whose expression is constant in numerous cells under numerous conditions (e.g., GAPDH). In other embodiments, the values in the computer may be ratios of, or differences between, normalized or non-normalized mRNA levels in different samples.

[0128] In one embodiment, the expression profiles expression profiles from cancer cells of one or more subjects, which cells are treated in vivo or in vitro with a drug or cytoline treatment, for example, a combination of TNFα and IFNγ used as a potential therapy of cancer. Expression data of a cell of a subject treated in vitro or in vivo with the drug is entered into a computer and the computer is instructed to compare the data entered to the data in the computer, and to provide results indicating whether the expression data input into the computer are more similar to those of a cell of a subject that is responsive to the drug or more similar to those of a cell of a subject that is not responsive to the drug. Thus, the results indicate whether the subject is likely to respond to the treatment with the drug or unlikely to respond to it.

[0129] The invention also provides a machine-readable or computer-readable medium including program instructions for performing the following steps: (i) comparing a plurality of values corresponding to expression levels of one or more genes characteristic of human lung tumor tissue in a query cell with a database including records comprising reference expression or expression profile data of one or more reference cells and an annotation of the type of cell; and (ii) indicating to which cell the query cell is most similar based on similarities of expression profiles. The reference cells may be cells from subjects at different stages of cancer. The reference cells may also be cells from subjects responding or not responding to a particular drug treatment and optionally incubated in vitro or in vivo with the drug.

[0130] The reference cells may also be cells from subjects responding or not responding to several different treatments, and the computer system indicates a preferred treatment for the subject. Accordingly, the invention provides a method for selecting a therapy for a patient having cancer, the method comprising: (i) providing the level of expression of one or more genes characteristic of human lung tumor tissue in a diseased cell of the patient; (ii) providing a plurality of reference profiles, each associated with a therapy, wherein the subject expression profile and each reference profile has a plurality of values, each value representing the level of expression of a gene characteristic of cancer; and (iii) selecting the reference profile most similar to the subject expression profile, to thereby select a therapy for said patient. In one embodiment, step (iii) may be performed by a computer. The most similar reference profile may be selected by weighing a comparison value of the plurality using a weight value associated with the corresponding expression data.

[0131] The relative abundance of an mRNA in two biological samples may be scored as a perturbation and its magnitude determined (i.e., the abundance is different in the two sources of mRNA tested), or as not perturbed (i.e., the relative abundance is the same). In various embodiments, a difference between the two sources of RNA of at least a factor of about 25% (RNA from one source is 25% more abundant in one source than the other source), more usually about 50%, even more often by a factor of about 2 (twice as abundant), 3 (three times as abundant) or 5 (five times as abundant) is scored as a perturbation. Perturbations may be used by a computer for calculating and expression comparisons.

Drug Design Using Microarrays

[0132] The invention also provides methods for designing and optimizing drugs for cancer, for example, those which have been identified as described herein. In one embodiment, compounds may be screened by comparing the expression level of one or more genes characteristic of human lung tumor tissue following incubation of a diseased cell of cancer or similar cell with the test compound. In another embodiment, the expression level of the genes may be determined using microarrays, and comparing the gene expression profile of a cell in response to the test compound with the gene expression profile of a normal cell corresponding to a diseased cell of cancer (a “reference profile”). In a further embodiment, the expression profile may also be compared to that of a diseased cell of cancer. The comparisons may be done by introducing the gene expression profile data of the cell treated with drug into a computer system comprising reference gene expression profiles, which are stored in a computer readable form, using appropriate algorithms. Test compounds may be screened for those that alter the level of expression of genes characteristic of human lung tumor tissue. Such compounds, that is, compounds which are capable of normalizing the expression of essentially all genes characteristic of human lung tumor tissue, are candidate therapeutics.

[0133] The efficacy of the compounds may then be tested in additional in vitro and in vivo assays, and in animal models (e.g., xenograft model). The test compound may be administered to the test animal, and one or more symptoms of the disease may be monitored for improvement of the condition of the animal. Expression of one or more genes characteristic of human lung tumor tissue may also be measured before and after administration of the test compound to the animal. A normalization of the expression of one or more of these genes is indicative of the efficiency of the compound for treating cancer in the animal.

[0134] In the clinical setting, obtaining human-derived samples of tissue exhibiting cancer may be difficult, if not prohibitive. Therefore, identification of gene expression changes indicative of efficacy of a therapeutic compound may be determined in a more easily accessible, surrogate cell population, for example, peripheral blood leukocytes (PBLs). This method may be performed either in a human or animal model system. In one embodiment, a test compound may be administered to the test animal (either normal or cancer-containing) at the same doses that have been observed to be efficacious in treating cancer in that animal model. Blood may be drawn from the animal at various time points (e.g., 1, 4, 7, and 24 hours following the first, mid-point, and last day of a regimen of multiple day dosing). Animals dosed with vehicle may be used as controls. RNA may be isolated from PBLs, and can be used to generate probes for hybridization to microarrays. The hybridization results may then be analyzed using computer programs and databases, as described above. The resulting expression profile may be compared directly to the analogous profile from the treated cancer tissue for similarities or simply correlated with efficacy (e.g., in terms of doses and time points) in the animal model.

[0135] In another embodiment, human blood may be treated ex vivo with a therapeutic compound at a dose consistent with the therapeutic dose in the animal model, or at a dose that is consistent with known plasma levels of the therapeutic dose in the animal model. The blood may be treated (e.g., rocking at 37° C.) with the therapeutic compound immediately, or after some period of incubation time (e.g., 24 hours) to allow for gene expression to re-equilibrate after the blood draw. The blood may also be treated with the therapeutic compound for various timepoints (e.g., 4 and 24 hours), and then PBL RNA isolated and used to create a probe for hybridization to a microarray. A compound solubilization agent (e.g., DMSO) may be used as a control. The resulting expression profile may be compared directly to the analogous profile from the treated cancer tissue for similarities or simply correlated with efficacy (e.g., in terms of doses and time points) in the animal model.

[0136] The toxicity of the candidate therapeutic compound may be evaluated, for example, by determining whether the compound induces the expression of genes known to be associated with a toxic response. Expression of such toxicity related genes may be determined in different cell types, for example, those that are known to express the genes. In fact, alterations in gene expression may serve as a more sensitive marker of human toxicity than routine preclinical safety studies. Microarrays may be used for detecting changes in the expression of genes known to be associated with a toxic response. It may be possible to perform proof of concept studies demonstrating that changes in gene expression levels may predict toxic events that were not identified by routine preclinical safety testing (see, e.g., Huang, et al., Toxicol. Sci. 63:196-207, 2001; Waring, et al., Toxicol. Appl. Pharamacol. 175:28-42, 2001).

[0137] Drug screening may be performed by adding a test compound to a sample of cells, and monitoring the effect. A parallel sample which does not receive the test compound may also be monitored as a control. The treated and untreated cells are then compared by any suitable phenotypic criteria, including but not limited to microscopic analysis, viability testing, ability to replicate, histological examination, the level of a particular RNA or polypeptide associated with the cells, the level of enzymatic activity expressed by the cells or cell lysates, and the ability of the cells to interact with other cells or compounds. Differences between treated and untreated cells indicates effects attributable to the test compound.

[0138] Desirable effects of a test compound include an effect on any phenotype that was conferred by the cancer-associated marker nucleic acid sequence. Examples include a test compound that limits the overabundance of mRNA, limits production of the encoded protein, or limits the functional effect of the protein. The effect of the test compound would be apparent when comparing results between treated and untreated cells.

Diagnostic and Prognostic Assays

[0139] The present invention provides nucleic acid sequences which are differentially regulated in cancer, and a method for identifying such sequences. The present invention provides a method for identifying a nucleotide sequence which is differentially regulated in a subject with cancer, comprising: hybridizing a nucleic acid sample corresponding to RNA obtained from the subject to a nucleic acid sample comprising one or more nucleic acid molecules of known identity; and measuring the hybridization of the nucleic acid sample to the one or more nucleic acid molecules of known identity, wherein a difference in the hybridization of the nucleic acid sample to the one or more nucleic acid molecules of known identity relative to a nucleic acid sample obtained from a subject without cancer is indicative of the differential expression of the nucleotide sequence in a subject with cancer.

[0140] Generally, the present invention provides a method for identifying nucleic acid sequences which are differentially regulated in a subject with cancer comprising isolating messenger RNA from a subject, generating cRNA from the mRNA sample, hybridizing the cRNA to a microarray comprising a plurality of nucleic acid molecules stably associated with discrete locations on the array, and identifying patterns of hybridization of the cRNA to the array. According to the present invention, a nucleic acid molecule which hybridizes to a given location on the array is said to be differentially regulated if the hybridization signal is, for example, at least two-fold higher or lower than the hybridization signal at the same location on an identical array hybridized with a nucleic acid sample obtained from a subject that does not have cancer.

[0141] Expression patterns may be used to derive a panel of biomarkers that can be used to predict the efficacy of drug treatment in the patients. The biomarkers may consist of gene expression levels from microarray experiments on RNA isolated from biological samples, RNA isolated from frozen samples of tumor biopsies, or mass spectrometry-derived protein masses in the serum.

[0142] Although the precise mechanism for data analysis will depend upon the exact nature of the data, a typical procedure for developing a panel of biomarkers is as follows. The data (gene expression levels or mass spectra) are collected for each patient prior to treatment. As the study progresses, the patients are classified according to their response to the drug treatment; either as efficacious or non-efficacious. Multiple levels of efficacy can be accommodated in a data model, but a binary comparison is considered optimal, particularly if the patient population is less than several hundred. Assuming adequate numbers of patients in each class, the protein and/or gene expression data may be analyzed by a number of techniques known in the art. Many of the techniques are derived from traditional statistics as well from the field of machine leaning. These techniques serve two purposes:

[0143] 1. Reduce the dimensionality of data—In the case of mass spectra or gene expression microarrays, data is reduced from many thousands of individual data points to bout three to ten. The reduction is based upon the predictive power of the data points when taken as a set.

[0144] 2. Training—These three to ten data points are then used to train multiple machine learning algorithms which then “learn” to recognize, in this case, patterns of protein masses or gene expression which distinguish efficacious drug treatment from non-efficacious. All patient samples can be used to train the algorithms.

[0145] The resulting trained algorithms are then tested in order to measure their predictive power. Typically, when less than many hundreds of training examples are available, some form of cross-validation is performed. To illustrate, consider a ten-fold cross validation. In this case, patient samples are randomly assigned to one of ten bins. In the first round of validation the samples in nine of the bins are used for training and the remaining samples in the tenth bin are used to test the algorithm. This is repeated an additional nine times, each time leaving out the samples in a different bin for testing. The results (correct predictions and errors) from all ten rounds are combined and the predictive power is then assessed. Different algorithms, as well as different panels, may be compared in this way for this study. The “best” algorithm/panel combination will then be selected. This “smart” algorithm may then be used in future studies to select the patients that are most likely to respond to treatment.

[0146] Many algorithms benefit from additional information taken for the patients. For example, gender or age could be used to improve predictive power. Also, data transformations such as normalization and smoothing may be used to reduce noise. Because of this, a large number of algorithms may be trained using many different parameters in order to optimize the outcome. If predictive patterns exist in the data, it is likely that an optimal, or near-optimal, “smart” algorithm can be developed. If more patient samples become available, the algorithm can be retrained to take advantage of the new data.

[0147] As an example using mass spectrometry, plasma may be applied to a hydrophobic SELDI-target, washed extensively in water, and analyzed by the SELDI-T of mass spectrometer. This may be repeated on 100 or more patient samples. The protein profiles resulting from the intensities of some 16,000 m/z values in each sample would be statistically analyzed in order to identify sets of specific m/z values that are predictive of drug efficacy. Identical experiments using other SELDI-targets, such as ion-exchange or IMAC surfaces, could also be conducted. These will capture different subsets of the proteins present in plasma. Furthermore, the plasma may be denatured and prefractionated prior to application onto the SELDI target.

[0148] The present invention provides methods for determining whether a subject is at risk for developing a disease or condition characterized by unwanted cell proliferation by detecting biomarkers, that is, nucleic acids and/or polypeptide markers for cancer.

[0149] In clinical applications, human tissue samples may be screened for the presence and/or absence of biomarkers identified herein. Such samples could consist of needle biopsy cores, surgical resection samples, lymph node tissue, or serum. For example, these methods include obtaining a biopsy, which is optionally fractionated by cryostat sectioning to enrich tumor cells to about 80% of the total cell population. In certain embodiments, nucleic acids extracted from these samples may be amplified using techniques well known in the art. The levels of selected markers detected would be compared with statistically valid groups of metastatic, non-metastatic malignant, benign, or normal tissue samples.

[0150] In one embodiment, the diagnostic method comprises determining whether a subject has an abnormal mRNA and/or protein level of the biomarkers, such as by Northern blot analysis, reverse transcription-polymerase chain reaction (RT-PCR), in situ hybridization, immunoprecipitation, Western blot hybridization, or immunohistochemistry. According to the method, cells may be obtained from a subject and the levels of the biomarkers, protein, or mRNA level, are determined and compared to the level of these markers in a healthy subject. An abnormal level of the biomarker polypeptide or mRNA levels is likely to be indicative of cancer.

[0151] In one embodiment, the method comprises using a nucleic acid probe to determine the presence of cancerous cells in a tissue from a patient. Specifically, the method comprises:
[0152] 1. providing a nucleic acid probe comprising a nucleotide sequence, for example, at least 10, 15, 25 or 40 nucleotides, and up to all or nearly all of the coding sequence which is complementary to a portion of the coding sequence of a nucleic acid sequence and is differentially expressed in tumors cells;
[0153] 2. obtaining a tissue sample from a patient potentially comprising cancerous cells;
[0154] 3. providing a second tissue sample containing cells substantially all of which are non-cancerous;
[0155] 4. contacting the nucleic acid probe under stringent conditions with RNA of each of said first and second tissue samples (e.g., in a Northern blot or in situ hybridization assay); and
[0156] 5. comparing (a) the amount of hybridization of the probe with RNA of the first tissue sample, with (b) the amount of hybridization of the probe with RNA of the second tissue sample; wherein a statistically significant difference in the amount of hybridization with the RNA of the first tissue sample as compared to the amount of hybridization with the RNA of the second tissue sample is indicative of the presence of cancerous cells in the first tissue sample.

[0157] In one aspect, the method comprises in situ hybridization with a probe derived from a given marker nucleic acid sequence. The method comprises contacting the labeled hybridization probe with a sample of a given type of tissue potentially containing cancerous or pre-cancerous cells as well as normal cells, and determining whether the probe labels some cells of the given tissue type to a degree significantly different (e.g., by at least a factor of two, or at least a factor of five, or at least a factor of twenty, or at least a factor of fifty) than the degree to which it labels other cells of the same tissue type.

[0158] Also within the invention is a method of determining the phenotype of a test cell from a given human tissue, for example, whether the cell is (a) normal, or (b) cancerous or precancerous, by contacting the mRNA of a test cell with a nucleic acid probe, for example, at least about 10, 15, 25, or 40 nucleotides, and up to all or nearly all of a sequence which is complementary to a portion of the coding sequence of a nucleic acid sequence, and which is differentially expressed in tumor cells as compared to normal cells of the given tissue type; and determining the approximate amount of hybridization of the probe to the mRNA, an amount of hybridization either more or less than that seen with the mRNA of a normal cell of that tissue type being indicative that the test cell is cancerous or pre-cancerous.

[0159] Alternatively, the above diagnostic assays may be carried out using antibodies to detect the protein product encoded by the marker nucleic acid sequence. Accordingly, in one embodiment, the assay would include contacting the proteins of the test cell with an antibody specific for the gene product of a nucleic acid, the marker nucleic acid being one which is expressed at a given control level in normal cells of the same tissue type as the test cell, and determining the approximate amount of immunocomplex formation by the antibody and the proteins of the test cell, wherein a statistically significant difference in the amount of the immunocomplex formed with the proteins of a test cell as compared to a normal cell of the same tissue type is an indication that the test cell is cancerous or pre-cancerous.

[0160] The method for producing polyclonal and/or monoclonal antibodies which specifically bind to polypeptides useful in the present invention is known to those of skill in the art and may be found in, for example, Dymecki, et al., (J. Biol. Chem. 267:4815, 1992); Boersma & Van Leeuwen, (J. Neurosci. Methods 51:317, 1994); Green, et al., (Cell 28:477, 1982); and Arnheiter, et al., (Nature 294:278, 1981).

[0161] Another such method includes the steps of: providing an antibody specific for the gene product of a marker nucleic acid sequence, the gene product being present in cancerous tissue of a given tissue type at a level more or less than the level of the gene product in non-cancerous tissue of the same tissue type; obtaining from a patient a first sample of tissue of the given tissue type, which sample potentially includes cancerous cells; providing a second sample of tissue of the same tissue type (which may be from the same patient or from a normal control, e.g. another individual or cultured cells), this second sample containing normal cells and essentially no cancerous cells; contacting the antibody with protein (which may be partially purified, in lysed but unfractionated cells, or in situ) of the first and second samples under conditions permitting immunocomplex formation between the antibody and the marker nucleic acid sequence product present in the samples; and comparing (a) the amount of immunocomplex formation in the first sample, with (b) the amount of immunocomplex formation in the second sample, wherein a statistically significant difference in the amount of immunocomplex formation in the first sample less as compared to the amount of immunocomplex formation in the second sample is indicative of the presence of cancerous cells in the first sample of tissue.

[0162] The subject invention further provides a method of determining whether a cell sample obtained from a subject possesses an abnormal amount of marker polypeptide which comprises (a) obtaining a cell sample from the subject, (b) quantitatively determining the amount of the marker polypeptide in the sample so obtained, and (c) comparing the amount of the marker polypeptide so determined with a known standard, so as to thereby determine whether the cell sample obtained from the subject possesses an abnormal amount of the marker polypeptide. Such marker polypeptides may be detected by immunohistochemical assays, dot-blot assays, ELISA, and the like.

[0163] Immunoassays are commonly used to quantitate the levels of proteins in cell samples, and many other immunoassay techniques are known in the art. The invention is not limited to a particular assay procedure, and therefore, is intended to include both homogeneous and heterogeneous procedures. Exemplary immunoassays which may be conducted according to the invention include fluorescence polarization immunoassay (FPIA), fluorescence immunoassay (FIA), enzyme immunoassay (EIA), nephelometric inhibition immunoassay (NIA), enzyme-linked immunosorbent assay (ELISA), and radioimmunoassay (RIA). An indicator moiety, or label group, may be attached to the subject antibodies and is selected so as to meet the needs of various uses of the method which are often dictated by the availability of assay equipment and compatible immunoassay procedures. General techniques to be used in performing the various immunoassays noted above are known to those of ordinary skill in the art.

[0164] In another embodiment, the level of the encoded product, or alternatively the level of the polypeptide, in a biological fluid (e.g., blood or urine) of a patient may be determined as a way of monitoring the level of expression of the marker nucleic acid sequence in cells of that patient. Such a method would include the steps of obtaining a sample of a biological fluid from the patient, contacting the sample (or proteins from the sample) with an antibody specific for an encoded marker polypeptide, and determining the amount of immune complex formation by the antibody, with the amount of immune complex formation being indicative of the level of the marker encoded product in the sample. This determination is particularly insructive when compared to the amount of immune complex formation by the same antibody in a control sample taken from a normal individual or in one or more samples previously or subsequently obtained from the same person.

[0165] In another embodiment, the method may be used to determine the amount of marker polypeptide present in a cell, which in turn may be correlated with progression of a hyperproliferative disorder. The level of the marker polypeptide may be used predictively to evaluate whether a sample of cells contains cells which are, or are predisposed towards becoming, transformed cells. Moreover, the subject method may be used to assess the phenotype of cells which are known to be transformed, the phenotyping results being useful in planning a particular therapeutic regimen. For example, very high levels of the marker polypeptide in sample cells is a powerful diagnostic and prognostic marker for a cancer. The observation of marker polypeptide levels may be utilized in decisions regarding, for example, the use of more aggressive therapies.

[0166] As set out above, one aspect of the present invention relates to diagnostic assays for determining, in the context of cells isolated from a patient, if the level of a marker polypeptide is significantly reduced in the sample cells. The term “significantly reduced” refers to a cell phenotype wherein the cell possesses a reduced cellular amount of the marker polypeptide relative to a normal cell of similar tissue origin. For example, a cell may have less than about 50%, 25%, 10%, or 5% of the marker polypeptide compared to that of a normal control cell. In particular, the assay evaluates the level of marker polypeptide in the test cells, and may compare the measured level with marker polypeptide detected in at least one control cell, for example, a normal cell and/or a transformed cell of known phenotype.

[0167] Of particular importance to the subject invention is the ability to quantitate the level of marker polypeptide as determined by the number of cells associated with a normal or abnormal marker polypeptide level. The number of cells with a particular marker polypeptide phenotype may then be correlated with patient prognosis. In one embodiment of the invention, the marker polypeptide phenotype of a lesion is determined as a percentage of cells in a biopsy which are found to have abnormally high/low levels of the marker polypeptide. Such expression may be detected by immunohistochemical assays, dot-blot assays, ELISA, and the like.

[0168] Where tissue samples are employed, immunohistochemical staining may be used to determine the number of cells having the marker polypeptide phenotype. For such staining, a multiblock of tissue may be taken from the biopsy or other tissue sample and subjected to proteolytic hydrolysis, employing such agents as protease K or pepsin. In certain embodiments, it may be desirable to isolate a nuclear fraction from the sample cells and detect the level of the marker polypeptide in the nuclear fraction.

[0169] The tissue samples are fixed by treatment with a reagent such as formalin, glutaraldehyde, methanol, or the like. The samples are then incubated with an antibody (e.g., a monoclonal antibody) with binding specificity for the marker polypeptides. This antibody may be conjugated to a label for subsequent detection of binding. Samples are incubated for a time sufficient for formation of the immunocomplexes. Binding of the antibody is then detected by virtue of a label conjugated to this antibody. Where the antibody is unlabeled, a second labeled antibody may be employed, for example, which is specific for the isotype of the anti-marker polypeptide antibody. Examples of labels which may be employed include radionuclides, fluorescers, chemiluminescers, enzymes, and the like.

[0170] Where enzymes are employed, the substrate for the enzyme may be added to the samples to provide a colored or fluorescent product. Examples of suitable enzymes for use in conjugates include horseradish peroxidase, alkaline phosphatase, malate dehydrogenase, and the like. Where not commercially available, such antibody-enzyme conjugates are readily produced by techniques known to those skilled in the art.

[0171] In one embodiment, the assay is performed as a dot blot assay. The dot blot assay finds particular application where tissue samples are employed as it allows determination of the average amount of the marker polypeptide associated with a single cell by correlating the amount of marker polypeptide in a cell-free extract produced from a predetermined number of cells.

[0172] It is well established in the cancer literature that tumor cells of the same type (e.g., lung and/or colon tumor cells) may not show uniformly increased expression of individual oncogenes or uniformly decreased expression of individual tumor suppressor genes. There may also be varying levels of expression of a given marker gene even between cells of a given type of cancer, further emphasizing the need for reliance on a battery of tests rather than a single test. Accordingly, in one aspect, the invention provides for a battery of tests utilizing a number of probes of the invention, in order to improve the reliability and/or accuracy of the diagnostic test.

[0173] In one embodiment, the present invention also provides a method wherein nucleic acid probes are immobilized on a DNA chip in an organized array. Oligonucleotides may be bound to a solid support by a variety of processes, including lithography. For example, a chip may hold up to 250,000 oligonucleotides. These nucleic acid probes comprise a nucleotide sequence, for example, at least about 12, 15, 25, or 40 nucleotides in length, and up to all or nearly all of a sequence which is complementary to a portion of the coding sequence of a marker nucleic acid sequence and is differentially expressed in tumor cells. The present invention provides significant advantages over the available tests for various cancers, because it increases the reliability of the test by providing an array of nucleic acid markers on a single chip.

[0174] The method includes obtaining a biopsy, which is optionally fractionated by cryostat sectioning to enrich tumor cells to about 80% of the total cell population. The DNA or RNA is then extracted, amplified, and analyzed with a DNA chip to determine the presence of absence of the marker nucleic acid sequences.

[0175] In one embodiment, the nucleic acid probes are spotted onto a substrate in a two-dimensional matrix or array. Samples of nucleic acids may be labeled and then hybridized to the probes. Double-stranded nucleic acids, comprising the labeled sample nucleic acids bound to probe nucleic acids, may be detected once the unbound portion of the sample is washed away.

[0176] The probe nucleic acids may be spotted on substrates including glass, nitrocellulose, etc. The probes can be bound to the substrate by either covalent bonds or by non-specific interactions, such as hydrophobic interactions. The sample nucleic acids can be labeled using radioactive labels, fluorophores, chromophores, etc.

[0177] In yet another embodiment, the invention contemplates using a panel of antibodies which are generated against the marker polypeptides of this invention. Such a panel of antibodies may be used as a reliable diagnostic probe for cancer. The assay of the present invention comprises contacting a biopsy sample containing cells, for example, lung cells, with a panel of antibodies to one or more of the encoded products to determine the presence or absence of the marker polypeptides.

[0178] The diagnostic methods of the subject invention may also be employed as follow-up to treatment, for example, quantitation of the level of marker polypeptides may be indicative of the effectiveness of current or previously employed cancer therapies as well as the effect of these therapies upon patient prognosis.

[0179] In addition, the marker nucleic acids or marker polypeptides may be utilized as part of a diagnostic panel for initial detection, follow-up screening, detection of reoccurrence, and post-treatment monitoring for chemotherapy or surgical treatment.

[0180] Accordingly, the present invention makes available diagnostic assays and reagents for detecting gain and/or loss of marker polypeptides from a cell in order to aid in the diagnosis and phenotyping of proliferative disorders arising from, for example, tumorigenic transformation of cells.

[0181] The diagnostic assays described above may be adapted to be used as prognostic assays, as well. Such an application takes advantage of the sensitivity of the assays of the invention to events which take place at characteristic stages in the progression of a tumor. For example, a given marker gene may be up- or down-regulated at a very early stage, perhaps before the cell is irreversibly committed to developing into a malignancy, while another marker gene may be characteristically up- or down-regulated only at a much later stage. Such a method could involve the steps of contacting the mRNA of a test cell with a nucleic acid probe derived from a given marker nucleic acid which is expressed at different characteristic levels in cancerous or precancerous cells at different stages of tumor progression, and determining the approximate amount of hybridization of the probe to the mRNA of the cell, such amount being an indication of the level of expression of the gene in the cell, and thus an indication of the stage of tumor progression of the cell; alternatively, the assay may be carried out with an antibody specific for the gene product of the given marker nucleic acid, contacted with the proteins of the test cell. A battery of such tests will disclose not only the existence and location of a tumor, but also will allow the clinician to select the mode of treatment most appropriate for the tumor, and to predict the likelihood of success of that treatment.

[0182] The methods of the invention may also be used to follow the clinical course of a tumor. For example, the assay of the invention may be applied to a tissue sample from a patient; following treatment of the patient for the cancer, another tissue sample is taken and the test repeated. Successful treatment will result in either removal of all cells which demonstrate differential expression characteristic of the cancerous or precancerous cells, or a substantial increase in expression of the gene in those cells, perhaps approaching or even surpassing normal levels.

[0183] In yet another embodiment, the invention provides methods for determining whether a subject is at risk for developing a disease, such as a predisposition to develop cancer, associated with aberrant activity of a polypeptide, wherein the aberrant activity of the polypeptide is characterized by detecting the presence or absence of a genetic lesion characterized by at least one of (a) an alteration affecting the integrity of a gene encoding a marker polypeptides, or (b) the mis-expression of the encoding nucleic acid. To illustrate, such genetic lesions may be detected by ascertaining the existence of at least one of (i) a deletion of one or more nucleotides from the nucleic acid sequence, (ii) an addition of one or more nucleotides to the nucleic acid sequence, (iii) a substitution of one or more nucleotides of the nucleic acid sequence, (iv) a gross chromosomal rearrangement of the nucleic acid sequence, (v) a gross alteration in the level of a messenger RNA transcript of the nucleic acid sequence, (vi) aberrant modification of the nucleic acid sequence, such as of the methylation pattern of the genomic DNA, (vii) the presence of a non-wild type splicing pattern of a messenger RNA transcript of the gene, (viii) a non-wild type level of the marker polypeptide, (ix) allelic loss of the gene, and/or (x) inappropriate post-translational modification of the marker polypeptide.

[0184] The present invention provides assay techniques for detecting lesions in the encoding nucleic acid sequence. These methods include, but are not limited to, methods involving sequence analysis, Southern blot hybridization, restriction enzyme site mapping, and methods involving detection of absence of nucleotide pairing between the nucleic acid to be analyzed and a probe.

[0185] Specific diseases or disorders, for example, genetic diseases or disorders, are associated with specific allelic variants of polymorphic regions of certain genes, which do not necessarily encode a mutated protein. Thus, the presence of a specific allelic variant of a polymorphic region of a gene in a subject may render the subject susceptible to developing a specific disease or disorder. Polymorphic regions in genes, may be identified, by determining the nucleotide sequence of genes in populations of individuals. If a polymorphic region is identified, then the link with a specific disease may be determined by studying specific populations of individuals, for example, individuals which developed a specific disease, such as cancer. A polymorphic region may be located in any region of a gene, for example, exons, in coding or non-coding regions of exons, introns, and promoter region.

[0186] In an exemplary embodiment, there is provided a nucleic acid composition comprising a nucleic acid probe including a region of nucleotide sequence which is capable of hybridizing to a sense or antisense sequence of a gene or naturally occurring mutants thereof, or 5′ or 3′ flanking sequences or intronic sequences naturally associated with the subject genes or naturally occurring mutants thereof. The nucleic acid of a cell is rendered accessible for hybridization, the probe is contacted with the nucleic acid of the sample, and the hybridization of the probe to the sample nucleic acid is detected. Such techniques may be used to detect lesions or allelic variants at either the genomic or mRNA level, including deletions, substitutions, etc., as well as to determine mRNA transcript levels.

[0187] An example of a detection method is allele specific hybridization using probes overlapping the mutation or polymorphic site and having about 5, 10, 20, 25, or 30 nucleotides around the mutation or polymorphic region. In one embodiment of the invention, several probes capable of hybridizing specifically to allelic variants are attached to a solid phase support, for example, a “chip.” Mutation detection analysis using these chips comprising oligonucleotides, also termed “DNA probe arrays” is described, for example, by Cronin, et al., (Human Mutation 7:244, 1996). In one embodiment, a chip may comprise all the allelic variants of at least one polymorphic region of a gene. The solid phase support is then contacted with a test nucleic acid and hybridization to the specific probes is detected. Accordingly, the identity of numerous allelic variants of one or more genes may be identified in a simple hybridization experiment.

[0188] In certain embodiments, detection of the lesion comprises utilizing the probe/primer in a polymerase chain reaction (PCR) (see, e.g., U.S. Pat. Nos. 4,683,195 and 4,683,202), such as anchor PCR or RACE PCR, or, alternatively, in a ligase chain reaction (LCR) (see, e.g., Landegran, et al., Science 241:1077-1080, 1988; Nakazaw, et al., Proc. Natl. Acad. Sci. USA 91:360-364, 1994), the latter of which can be particularly useful for detecting point mutations in the gene (see, e.g., Abravaya, et al., Nuc. Acid Res. 23:675-682, 1995). In an illustrative embodiment, the method includes the steps of (i) collecting a sample of cells from a patient, (ii) isolating nucleic acid (e.g., genomic, mRNA, or both) from the cells of the sample, (iii) contacting the nucleic acid sample with one or more primers which specifically hybridize to a nucleic acid sequence under conditions such that hybridization and amplification of the nucleic acid (if present) occurs, and (iv) detecting the presence or absence of an amplification product, or detecting the size of the amplification product and comparing the length to a control sample. It is anticipated that PCR and/or LCR may be desirable to use as a preliminary amplification step in conjunction with any of the techniques used for detecting mutations described herein.

[0189] The invention thus, also encompasses methods of screening for agents which inhibit or enhance the expression of the nucleic acid markers in vitro, comprising exposing a cell or tissue in which the marker nucleic acid mRNA is detectable in cultured cells to an agent in order to determine whether the agent is capable of inhibiting or enhancing production of the mRNA; and determining the level of mRNA in the exposed cells or tissue, wherein a decrease in the level of the mRNA after exposure of the cell line to the agent is indicative of inhibition of the marker nucleic acid mRNA production and an increase in mRNA levels is indicative of enhancement of maker mRNA production.

[0190] Alternatively, the screening method may include in vitro screening of a cell or tissue in which marker protein is detectable in cultured cells to an agent suspected of inhibiting or enhancing production of the marker protein; and determining the level of the marker protein in the cells or tissue, wherein a decrease in the level of marker protein after exposure of the cells or tissue to the agent is indicative of inhibition of marker protein production and an increase on the level of marker protein is indicative of enhancement of marker protein production.

[0191] The invention also encompasses in vivo methods of screening for agents which inhibit or enhance expression of the marker nucleic acids, comprising exposing a subject having tumor cells in which marker mRNA or protein is detectable to an agent suspected of inhibiting or enhancing production of marker mRNA or protein; and determining the level of marker mRNA or protein in tumor cells of the exposed mammal. A decrease in the level of marker mRNA or protein after exposure of the subject to the agent is indicative of inhibition of marker nucleic acid expression and an increase in the level of marker mRNA or protein is indicative of enhancement of marker nucleic acid expression.

[0192] Accordingly, the invention provides a method comprising incubating a cell expressing the marker nucleic acids with a test compound and measuring the mRNA or protein level. The invention further provides a method for quantitatively determining the level of expression of the marker nucleic acids in a cell population, and a method for determining whether an agent is capable of increasing or decreasing the level of expression of the marker nucleic acids in a cell population. The method for determining whether an agent is capable of increasing or decreasing the level of expression of the marker nucleic acids in a cell population comprises the steps of (a) preparing cell extracts from control and agent-treated cell populations, (b) isolating the marker polypeptides from the cell extracts, and (c) quantifying (e.g., in parallel) the amount of an immunocomplex formed between the marker polypeptide and an antibody specific to said polypeptide. The marker polypeptides of this invention may also be quantified by assaying for its bioactivity. Agents that induce an increase in the marker nucleic acid expression may be identified by their ability to increase the amount of immunocomplex formed in the treated cell as compared with the amount of the immunocomplex formed in the control cell. In a similar manner, agents that decrease expression of the marker nucleic acid may be identified by their ability to decrease the amount of the immunocomplex formed in the treated cell extract as compared to the control cell.

Predictive Assays

[0193] Laboratory-based assays, which can predict clinical benefit from a given anti-cancer agent, will greatly enhance the clinical management of patients with cancer. In order to assess this effect, a biomarker associated with the anti-cancer agent may be analyzed in a biological sample (e.g., tumor sample, plasma) before, during, and following treatment.

[0194] Another approach to monitor treatment is an evaluation of serum proteomic spectra. Specifically, plasma samples may be subjected to mass spectroscopy (e.g., surface-enhanced laser desorption and ionization) and a proteomic spectra may be generated for each patient. A set of spectra, derived from analysis of plasma from patients before and during treatment, may be analyzed by an iterative searching algorithm, which can identify a proteomic pattern that completely discriminates the treated samples from the untreated samples. The resulting pattern may then be used to predict the clinical benefit following treatment.

[0195] Global gene expression profiling of biological samples (e.g., tumor biopsy samples, blood samples) and bioinformatics-driven pattern identification may be utilized to predict clinical benefit and sensitivity, as well as development of resistance to an anti-cancer agent. For example, RNA isolated from cells derived from whole blood from patients before and during treatment may be used to generate blood cell gene expression profiles utilizing Affymetrix GeneChip technology and algorithms. These gene expression profiles may then predict the clinical benefit from treatment with a particular anti-cancer agent.

[0196] Analysis of the biochemical composition of urine by 1D ¹H-NMR (Nuclear Magnetic Resonance) may also be utilized as a predictive assay. Pattern recognition techniques may be used to evaluate the metabolic response to treatment with an anti-cancer agent and to correlate this response with clinical endpoints. The biochemical or endogenous metabolites excreted in urine have been well-characterized by proton NMR for normal subjects (Zuppi, et al., Clin Chim Acta 265:85-97, 1997). These metabolites (approximately 3040) represent the by-products of the major metabolic pathways, such as the citric acid and urea cycles. Drug-, disease-, and genetic-stimuli have been shown to produce metabolic-specific changes in baseline urine profiles that are indicative of the timeline and magnitude of the metabolic response to the stimuli. These analyses are multi-variant and therefore use pattern recognition techniques to improve data interpretation. Urinary metabolic profiles may be correlated with clinical endpoints to determine the clinical benefit.

Kits

[0197] The invention further provides kits for determining the expression level of genes characteristic of human lung tumor tissue. The kits may be useful for identifying subjects that are predisposed to developing cancer or who have cancer, as well as for identifying and validating therapeutics for cancer. In one embodiment, the kit comprises a computer readable medium on which is stored one or more gene expression profile of diseased cells of cancer, or at least values representing levels of expression of one or more genes characteristic of human lung tumor tissue in a diseased cell. The computer readable medium can also comprise gene expression profiles of counterpart normal cells, diseased cells treated with a drug, and any other gene expression profile described herein. The kit can comprise expression profile analysis software capable of being loaded into the memory of a computer system.

[0198] A kit can comprise a microarray comprising probes of genes characteristic of human lung tumor tissue. A kit can comprise one or more probes or primers for detecting the expression level of one or more genes characteristic of human lung tumor tissue and/or a solid support on which probes attached and which can be used for detecting expression of one or more genes characteristic of human lung tumor tissue in a sample. A kit may further comprise nucleic acid controls, buffers, and instructions for use.

[0199] Other kits provide compositions for treating cancer. For example, a kit can also comprise one or more nucleic acids corresponding to one or more genes characteristic of human lung tumor tissue (e.g., for use in treating a patient having cancer). The nucleic acids can be included in a plasmid or a vector (e.g., a viral vector). Other kits comprise a polypeptide encoded by a gene characteristic of cancer or an antibody to a polypeptide. Yet other kits comprise compounds identified herein as agonists or antagonists of genes characteristic of human lung tumor tissue. The compositions may be pharmaceutical compositions comprising a pharmaceutically acceptable excipient.

### EXAMPLES

[0200] It will be apparent to those skilled in the art that the examples and embodiments described herein are by way of illustration and not of limitation, and that other examples may be used without departing from the spirit and scope of the present invention, as set forth in the claims.

### Example 1.

### Gene Expression Profiling Protocol

A. Tissue Source

[0201] Human lung tumor tissue and normal adjacent tissue were purchased from the National Disease Research Institute.

B. RNA Extraction and cRNA Preparation

[0202] Total RNA was extracted from the human tissues using TRIzol reagent (Life Technologies, MD) according to a modified vendor protocol which utilizes the RNeasy protocol (Qiagen, Calif.). After homogenization with a Brinkmann Polytron PT10/35 (Brinkmann, Switzerland) and phase separation with chloroform, samples were applied to RNeasy columns. RNA samples were treated with DNase I using RNase-free DNase Set (Qiagen, Calif.).

[0203] After elution and quantitation with UV spectrophotometry, each sample was reverse transcribed into double-stranded cDNA using the Gibco Superscript II Choice System for RT-PCR according to vendor protocol (Invitrogen, Calif.).

[0204] Samples were organically extracted and ethanol precipitated. Approximately 1 μg cDNA was then used in an in vitro transcription reaction incorporating biotinylated nucleotides using an RNA labeling kit Enzo Diagnostics, NY). The resulting cRNA was put through RNeasy clean-up protocol and then quantified using UV spectrophotometry. The cRNA (15 μg) was fragmented in the presence of MgOAc and KOAc at 94° C. Fragmented RNA (10 μg) was loaded onto each array, one cRNA sample per array. Arrays were hybridized for 16 hours at 45° C. rotating at 60 rpm in an Affymetrix GeneChip Hybridization Oven 640.

C. Microarray Suite 5.0 Analysis

[0205] Following hybridization, arrays were stained with Phycoerythrin-conjugated Streptavidin, placed in an Agilent GeneArray Scanner and then exposed to a 488 nm laser, causing excitation of the phycoerythrin. The Microarray Suite 5.0 software digitally converts the intensity of light given off by the array into a numeric value indicative of levels of gene expression. Because each array represents a single sample, tumor RNA was compared to the RNA isolated from normal adjacent tissue.

D. Spotfire Analysis

[0206] The goal is to generate sets of markers to distinguish between lung cancer and normal tissues. This marker set represents a set of probe sets that is an optimum set for the prediction of whether or not a lung tissue is cancerous using a support vector machine. The optimal set is determined to be the one that shows the greatest prediction accuracy with the least error. This marker set was derived using the following method:
[0207] 1. The data was imported into Spotfire.
[0208] 2. A Treatment Comparison between cancer and normal tissues was performed using the t-test option.
[0209] 3. The following criteria were used to select the probe sets:
   [0210] a. The data showed that the probe sets were all not “Absent,” as determined by the Affymetrix Microarray Suite software v. 5.0 (Affymetrix, Santa Clara, Calif.) for either all of the normal or all of the cancer samples
   [0211] b. The data for the probe set showed a p-value of less than or equal to 0.001 according to the t-test.
[0212] 4. AU probe sets not meeting these criteria were eliminated from further analysis.
[0213] 5. The remaining data was used in a selection process using custom software in conjunction with a modified version of the svm-train program (C++ version) which is part of LIBSVM (Chang and Lin, LIBSVM: A Library for Support Vector Machines, 2001. Software available from http://www.csie.ntu.edu.tw/˜cjlin/libsvm). The custom software was written in the Perl language v. 5.004. The software was run on an SGI Origin 2000 running the IRIX 6.5.7f operation system. This software was used in the following manner:
   [0214] a. The Perl program was used as a “wrapper” to control svm-train. Its functions were to select subsets of the data and feed these sets to svm-train for training support vector machines (SVM).
   [0215] b. Training consisted of many elimination rounds. During each round many support vector machines were trained using ten fold cross validation in order to estimate accuracy and error. Each SVM was trained on all data except that the data from one probe set was left out. One probe set was eliminated from the data set at each round. This was the probe set that showed the best error and/or accuracy for the SVM when it was eliminated.
   [0216] c. Training continued until there was only one probe set left.
   [0217] d. The set of probe sets that showed the greatest accuracy with the least error was selected and is shown in Table 1.
   [0218] e. The input arguments to svm-train were -s0-t0-c1-v 10

[0219] Marker Set Two (Table 2) represents a set of probe sets that is an optimum set for the prediction of whether or not a lung tissue is cancerous using a support vector machine. The optimal set is determined to be the one that shows the greatest prediction accuracy with the least error. This marker set was derived using the method described for Marker Set 1 with the following exceptions:
[0220] 1. The data set was not limited to those probe sets that showed a t-test p-value of less than or equal to 0.001.
[0221] 2. Five percent of the probe sets were eliminated at each round until 1000 probe sets remained. Then, only one probe set was eliminated during each round.

[0222] Marker Set Three (Table 3) represents a set of probe sets that is an optimum set for the prediction of whether or not a lung tissue is cancerous using a support vector machine. The optimal set is determined to be the one that shows the greatest prediction accuracy. This marker set is a subset of the set listed in Table 2. This subset had the same level of accuracy (100%) with an error that was only 0.448% greater than the set listed in Table 2.

[0223] All three marker sets could select which lung tissues were cancerous and which were normal with 100% accuracy using their respective methods as determined by ten fold cross validation.

TABLE 1
Lung Tumor Marker (Set One)

| SEQ | SEQ | | | | | |
|---|---|---|---|---|---|---|
| ID NO | ID NO | | Gene | | Genbank | Unigene |
| (DNA) | (Protein) | Probe Set | Symbol | Title | Accession | Cluster |
| 1 | 2 | 205819_at | MARCO | macrophage receptor with collagenous structure | NM_006770.1 | Hs.67726 |
| 3 | 4 | 201935_s_at | EIF4G3 | eukaryotic translation initiation factor 4 gamma, 3 | AI768122 | Hs.25732 |
| 5 | 6 | 200694_s_at | DDX24 | DEAD/H (Asp-Glu-Ala-Asp/His) box polypeptide 24 | NM_020414.2 | Hs.155986 |
| 7 | 8 | 212311_at | KIAA0746 | KIAA0746 protein | AB018289.1 | Hs.49500 |
| 9 | 10 | 207843_x_at | CYB5 | cytochrome b-5 | NM_001914.1 | Hs.83834 |
| 11 | 12 | 200966_x_at | ALDOA | aldolase A, fructose-bisphosphate | NM_000034.1 | Hs.273415 |
| 13 | 14 | 48031_r_at | C5orf4 | chromosome 5 open reading frame 4 | H93077 | Hs.10235 |
| 15 | 16 | 206200_s_at | ANXA11 | annexin A11 | NM_001157.1 | Hs.75510 |
| 17 | 18 | 205812_s_at | SULT1C2 | sulfotransferase family, cytosolic, 1C, member 2 | NM_006588.1 | Hs.312644 |
| 19 | 20 | 210616_s_at | KIAA0905 | yeast Sec31p homolog | AB020712.1 | Hs.70266 |
| 21 | 22 | 200672_x_at | SPTBN1 | spectrin, beta, non-erythrocytic 1 | NM_003128.1 | Hs.107164 |
| 23 | 24 | 215838_at | ILT11 | leukocyte immunoglobulin-like receptor, subfamily B (with TM | AF212842.1 | Hs.375022 |
| | | | | and ITIM domains), member 7 | | |
| 25 | 26 | 212581_x_at | GAPD | glyceraldehyde-3-phosphate dehydrogenase | BE561479 | Hs.169476 |
| 27 | 28 | 55662_at | FLJ13114 | hypothetical protein FLJ13114 | H27225 | Hs.9444 |
| 29 | 30 | 209124_at | MYD88 | myeloid differentiation primary response gene (88) | U70451.1 | Hs.82116 |
| 31 | 32 | 221031_s_at | DKFZP434F0318 | hypothetical protein DKFZp434F0318 | NM_030817.1 | Hs.23388 |
| 33 | 34 | 210299_s_at | FHL1 | four and a half LIM domains 1 | AF063002.1 | Hs.239069 |
| 35 | 36 | 220367_s_at | FLJ12761 | hypothetical protein FLJ12761 | NM_024545.1 | Hs.10554 |
| 37 | 38 | 201535_at | UBL3 | ubiquitin-like 3 | NM_007106.1 | Hs.173091 |
| 39 | 40 | 200843_s_at | EPRS | glutamyl-prolyl-tRNA synthetase | NM_004446.1 | Hs.55921 |
| 41 | 42 | 217294_s_at | ENO1 | enolase 1, (alpha) | U88968.1 | Hs.381173 |
| 43 | 44 | 217234_s_at | VIL2 | villin 2 (ezrin) | AF199015.1 | Hs.155191 |
| 45 | 46 | 208881_x_at | IDI1 | isopentenyl-diphosphate delta isomerase | BC005247.1 | Hs.76038 |
| 47 | 48 | 202310_s_at | COL1A1 | collagen, type I, alpha 1 | NM_000088.1 | Hs.172928 |
| 49 | 50 | 213438_at | | Homo sapiens cDNA FLJ34019 fis, clone FCBBF2002898 | AA995925 | Hs.7309 |
| 51 | 52 | 202857_at | TMEM4 | transmembrane protein 4 | NM_014255.1 | Hs.8752 |
| 53 | 54 | 219282_s_at | TRPV2 | transient receptor potential cation channel, subfamily V, | NM_015930.1 | Hs.279746 |
| | | | | member 2 | | |
| 55 | 56 | 201432_at | CAT | catalase | NM_001752.1 | Hs.76359 |
| 57 | 58 | 202150_s_at | HEF1 | enhancer of filamentation 1 (cas-like docking; Crk-associated | U64317.1 | Hs.80261 |
| | | | | substrate related) | | |
| 59 | 60 | 207265_s_at | KDELR3 | KDEL (Lys-Asp-Glu-Leu) endoplasmic reticulum protein | NM_016657.1 | Hs.250696 |
| | | | | retention receptor 3 | | |
| 61 | 62 | 208884_s_at | DD5 | progestin induced protein | AF006010.1 | Hs.278428 |
| 63 | 64 | 216037_x_at | TCF7L2 | transcription factor 7-like 2 (T-cell specific, HMG-box) | AA664011 | Hs.348412 |
| 65 | 66 | 214752_x_at | FLNA | filamin A, alpha (actin binding protein 280) | AI625550 | Hs.195464 |
| 67 | 68 | 203883_s_at | Rab11-FIP2 | KIAA0941 protein | BG249608 | Hs.173656 |
| 69 | 70 | 205382_s_at | DF | D component of complement (adipsin) | NM_001928.1 | Hs.155597 |
| 71 | 72 | 204063_s_at | ULK2 | unc-51-like kinase 2 (C. elegans) | NM_014683.1 | Hs.151406 |
| 73 | 352 | 204661_at | CDW52 | CDW52 antigen (CAMPATH-1 antigen) | NM_001803.1 | Hs.276770 |
| 74 | 75 | 210950_s_at | FDFT1 | farnesyl-diphosphate farnesyltransferase 1 | BC003573.1 | Hs.48876 |
| 76 | 77 | 202085_at | TJP2 | tight junction protein 2 (zona occludens 2) | NM_004817.1 | Hs.75608 |
| 78 | 79 | 201997_s_at | SHARP | SMART/HDAC1 associated repressor protein | NM_015001.1 | Hs.184245 |
| 80 | 81 | 221896_s_at | DKFZP564K247 | DKFZP564K247 protein | BE739519 | Hs.7917 |
| 82 | 83 | 206283_s_at | TAL1 | T-cell acute lymphocytic leukemia 1 | NM_003189.1 | Hs.73828 |
| 84 | 85 | 203186_s_at | S100A4 | S100 calcium binding protein A4 (calcium protein, calvasculin, | NM_002961.2 | Hs.81256 |
| | | | | metastasin, murine placental homolog) | | |
| 86 | 87 | 213056_at | KIAA1013 | KIAA1013 protein | AU145019 | Hs.96427 |
| 88 | 89 | 208622_s_at | VIL2 | villin 2 (ezrin) | NM_003379.2 | Hs.155191 |
| 90 | 91 | 205357_s_at | AGTR1 | angiotensin II receptor, type 1 | NM_000685.2 | Hs.89472 |
| 92 | 93 | 214366_s_at | ALOX5 | arachidonate 5-lipoxygenase | AA995910 | Hs.89499 |
| 94 | 95 | 214135_at | CLDN18 | claudin 18 | BE551219 | Hs.278966 |

[0224] TABLE 2
Lung Tumor Marker (Set Two)

| SEQ | SEQ | | | | | |
|---|---|---|---|---|---|---|
| ID NO | ID NO | | | | Genbank | Unigene |
| (DNA) | (Protein) | Probe Set | Gene Symbol | Title | Accession | Cluster |
| 96 | 97 | 219065_s_at | LOC51072 | C21 orf19-like protein | NM_015955.1 | Hs.20814 |
| 98 | 99 | 213627_at | | Homo sapiens cDNA FLJ33684 fis, clone BRAWH2002630, | AI924630 | Hs.376719 |
| | | | | highly similar to Human hepatocellular | | |
| | | | | carcinoma associated protein (JCL-1) mRNA | | |
| 100 | 101 | 216438_s_at | | | AL133228 | |
| 102 | 103 | 209553_at | KIAA0804 | KIAA0804 protein | BC001001.2 | Hs.7316 |
| 104 | 105 | 202911_at | MSH6 | mutS homolog 6 (E. coli) | NM_000179.1 | Hs.3248 |
| 106 | 107 | 214167_s_at | RPLP0 | ribosomal protein, large, P0 | AA555113 | Hs.350108 |
| 108 | 109 | 202690_s_at | SNRPD1 | small nuclear ribonucleoprotein D1 polypeptide 16 kDa | BC001721.1 | Hs.86948 |
| 110 | 111 | 202345_s_at | FABP5 | fatty acid binding protein 5 (psoriasis-associated) | NM_001444.1 | Hs.153179 |
| 112 | 113 | 34031_i_at | CCM1 | cerebral cavernous malformations 1 | U90268 | Hs.93810 |
| 114 | 115 | 212944_at | | Homo sapiens cDNA: FLJ21243 fis, clone COL01164 | AK024896.1 | Hs.268016 |
| 116 | 117 | 217806_s_at | DKFZP586F1524 | DKFZP586F1524 protein | NM_015584.1 | Hs.241543 |
| 118 | 119 | 210849_s_at | VPS41 | vacuolar protein sorting 41 (yeast) | AF135593.1 | Hs.180941 |
| 120 | 121 | 213491_x_at | RPN2 | ribophorin II | AL514285 | Hs.75722 |
| 122 | 123 | 200999_s_at | CKAP4 | cytoskeleton-associated protein 4 | NM_006825.1 | Hs.74368 |
| 124 | 125 | 209222_s_at | OSBPL2 | oxysterol binding protein-like 2 | BC000296.1 | Hs.15519 |
| 126 | 127 | 215121_x_at | IGL | immunoglobulin lambda locus | AA680302 | Hs.181125 |
| 128 | 129 | 204675_at | SRD5A1 | steroid-5-alpha-reductase, alpha polypeptide 1 (3-oxo-5 | NM_001047.1 | Hs.552 |
| | | | | alpha-steroid delta 4-dehydrogenase alpha 1) | | |
| 130 | 131 | 205786_s_at | ITGAM | integrin, alpha M (complement component receptor 3, alpha; | NM_000632.2 | Hs.172631 |
| | | | | also known as CD11b (p170), macrophage antigen | | |
| | | | | alpha polypeptide) | | |
| 132 | 133 | 205133_s_at | HSPE1 | heat shock 10 kDa protein 1 (chaperonin 10) | NM_002157.1 | Hs.1197 |
| 134 | 135 | 201381_x_at | SIP | Siah-interacting protein | AF057356.1 | Hs.27258 |
| 136 | 137 | 215176_x_at | IGKC | immunoglobulin kappa constant | AW404894 | Hs.156110 |
| 138 | 139 | 211714_x_at | DKFZp434N0650 | hypothetical protein DKFZp434N0650 | BC005838.1 | Hs.179661 |
| 140 | 141 | 200650_s_at | LDHA | lactate dehydrogenase A | NM_005566.1 | Hs.2795 |
| 142 | 143 | 209433_s_at | PPAT | phosphoribosyl pyrophosphate amidotransferase | AI457120 | Hs.311 |
| 144 | 145 | 205194_at | PSPH | phosphoserine phosphatase | NM_004577.1 | Hs.56407 |
| 146 | 147 | 219654_at | PTPLA | protein tyrosine phosphatase-like (proline instead of | NM_014241.1 | Hs.114062 |
| | | | | catalytic arginine), member a | | |
| 148 | 149 | 201496_x_at | MYH11 | myosin, heavy polypeptide 11, smooth muscle | AI889739 | Hs.78344 |
| 150 | 151 | 214039_s_at | LC27 | putative integral membrane transporter | T15777 | Hs.296398 |
| 152 | 153 | 212137_at | MGC19556 | hypothetical protein MGC19556 | AV746402 | Hs.334787 |
| 154 | 155 | 212174_at | AK2 | adenylate kinase 2 | AK023758.1 | Hs.171811 |
| 156 | 157 | 209170_s_at | GPM6B | glycoprotein M6B | AF016004.1 | Hs.5422 |
| 158 | 159 | 218397_at | FLJ10335 | hypothetical protein FLJ10335 | NM_018062.1 | Hs.279841 |
| 160 | 161 | 203738_at | FLJ11193 | hypothetical protein FLJ11193 | AI421192 | Hs.151046 |
| 162 | 163 | 202998_s_at | LOXL2 | lysyl oxidase-like 2 | NM_002318.1 | Hs.83354 |
| 164 | 165 | 201021_s_at | DSTN | destrin (actin depolymerizing factor) | BF697964 | Hs.82306 |
| 166 | 167 | 209354_at | TNFRSF14 | tumor necrosis factor receptor superfamily, | BC002794.1 | Hs.279899 |
| | | | | member 14 (herpesvirus entry mediator) | | |
| 168 | 169 | 204269_at | PIM2 | pim-2 oncogene | NM_006875.1 | Hs.80205 |
| 170 | 171 | 200976_s_at | TAX1BP1 | Tax1 (human T-cell leukemia virus type I) binding protein 1 | NM_006024.2 | Hs.5437 |
| 172 | 173 | 218883_s_at | FLJ23468 | hypothetical protein FLJ23468 | NM_024629.1 | Hs.38178 |
| 174 | 175 | 201425_at | ALDH2 | aldehyde dehydrogenase 2 family (mitochondrial) | NM_000690.1 | Hs.195432 |
| 176 | 177 | 212489_at | COL5A1 | collagen, type V, alpha 1 | AI983428 | Hs.146428 |
| 178 | 179 | 201422_at | IFI30 | interferon, gamma-inducible protein 30 | NM_006332.1 | Hs.14623 |
| 180 | 181 | 205273_s_at | MP1 | metalloprotease 1 (pitrilysin family) | NM_014968.1 | Hs.260116 |
| 182 | 183 | 203854_at | IF | I factor (complement) | NM_000204.1 | Hs.36602 |
| 184 | 185 | 201059_at | EMS1 | ems1 sequence (mammary tumor and squamous cell | NM_005231.1 | Hs.119257 |
| | | | | carcinoma-associated (p80/85 src substrate) | | |
| 186 | 187 | 203233_at | IL4R | interleukin 4 receptor | NM_000418.1 | Hs.75545 |
| 188 | 189 | 213365_at | KIAA1504 | KIAA1504 protein | N64622 | Hs.157426 |
| 190 | 191 | 202722_s_at | GFPT1 | glutamine-fructose-6-phosphate transaminase 1 | NM_002056.1 | Hs.1674 |
| 192 | 193 | 220032_at | FLJ21986 | hypothetical protein FLJ21986 | NM_024913.1 | Hs.255416 |
| 194 | 195 | 202403_s_at | COL1A2 | collagen, type I, alpha 2 | AA788711 | Hs.179573 |
| 196 | 197 | 217871_s_at | MIF | macrophage migration inhibitory factor | NM_002415.1 | Hs.73798 |
| | | | | (glycosylation-inhibiting factor) | | |
| 198 | 199 | 205173_x_at | CD58 | CD58 antigen, (lymphocyte function-associated antigen 3) | NM_001779.1 | Hs.75626 |
| 200 | 201 | 207812_s_at | GORASP2 | golgi reassembly stacking protein 2, 55 kDa | NM_015530.1 | Hs.6880 |
| 202 | 203 | 218003_s_at | FKBP3 | FK506 binding protein 3, 25 kDa | NM_002013.1 | Hs.350402 |
| 204 | 205 | 201672_s_at | USP14 | ubiquitin specific protease 14 (tRNA-guanine transglycosylase) | NM_005151.1 | Hs.75981 |
| 206 | 207 | 201264_at | COPE | coatomer protein complex, subunit epsilon | NM_007263.1 | Hs.10326 |
| 208 | 209 | 208623_s_at | VIL2 | villin 2 (ezrin) | J05021.1 | Hs.155191 |
| 210 | 211 | 202243_s_at | PSMB4 | proteasome (prosome, macropain) subunit, beta type, 4 | NM_002796.1 | Hs.89545 |
| 212 | 213 | 208948_s_at | STAU | staufen, RNA binding protein (Drosophila) | BC000830.1 | Hs.6113 |
| 214 | 215 | 220044_x_at | LUC7A | cisplatin resistance-associated overexpressed protein | NM_016424.1 | Hs.3688 |
| 216 | 217 | 205873_at | PIGL | phosphatidylinositol glycan, class L | NM_004278.1 | Hs.27008 |
| 218 | 219 | 217791_s_at | PYCS | pyrroline-5-carboxylate synthetase | NM_002860.1 | Hs.114366 |
| | | | | (glutamate gamma-semialdehyde synthetase) | | |
| 220 | 221 | 212865_s_at | COL14A1 | collagen, type XIV, alpha 1 (undulin) | BF449063 | Hs.36131 |
| 222 | 223 | 212237_at | KIAA0978 | KIAA0978 protein | AL117518.1 | Hs.3686 |
| 224 | 225 | 209969_s_at | STAT1 | signal transducer and activator of transcription 1, 91 kDa | BC002704.1 | Hs.21486 |
| 226 | 227 | 213693_s_at | MUC1 | mucin 1, transmembrane | AI610869 | Hs.89603 |
| 228 | 229 | 201973_s_at | LOC51622 | CGI-43 protein | AL550875 | Hs.289112 |
| 230 | 231 | 202948_at | IL1R1 | interleukin 1 receptor, type I | NM_000877.1 | Hs.82112 |
| 232 | 233 | 204619_s_at | CSPG2 | chondroitin sulfate proteoglycan 2 (versican) | BF590263 | Hs.81800 |
| 234 | 235 | 204017_at | KDELR3 | KDEL (Lys-Asp-Glu-Leu) endoplasmic reticulum protein | NM_006855.2 | Hs.250696 |
| | | | | retention receptor 3 | | |
| 236 | 237 | 201231_s_at | ENO1 | enolase 1, (alpha) | NM_001428.1 | Hs.254105 |
| 238 | 239 | 200699_at | | ESTs, Weakly similar to A43932 mucin 2 precursor, | NM_006854.2 | Hs.380986 |
| | | | | intestinal - human (fragments) [H. sapiens] | | |
| 240 | 241 | 200594_x_at | HNRPU | heterogeneous nuclear ribonucleoprotein U | NM_004501.1 | Hs.103804 |
| | | | | (scaffold attachment factor A) | | |
| 242 | 243 | 218194_at | DKFZP566E144 | small fragment nuclease | NM_015523.1 | Hs.7527 |
| 244 | 245 | 212842_x_at | RANBP2L1 | RAN binding protein 2-like 1 | AL043571 | Hs.179825 |
| 246 | 247 | 216640_s_at | P5 | protein disulfide isomerase-related protein | AK026926.1 | Hs.182429 |
| 248 | 249 | 212041_at | ATP6V0D1 | ATPase, H+ transporting, lysosomal 38 kDa, V0 | AL566172 | Hs.106876 |
| | | | | subunit d isoform 1 | | |
| 250 | 251 | 218167_at | LOC51321 | hypothetical protein LOC51321 | NM_016627.1 | Hs.268122 |
| 252 | 253 | 209274_s_at | MGC4276 | hypothetical protein MGC4276 similar to CG8198 | BC002675.1 | Hs.177776 |
| 254 | 255 | 208742_s_at | SAP18 | sin3-associated polypeptide, 18 kDa | U78303.1 | Hs.23964 |
| 256 | 257 | 205034_at | CCNE2 | cyclin E2 | NM_004702.1 | Hs.30464 |
| 258 | 259 | 218795_at | ACP6 | lysophosphatidic acid phosphatase | NM_016361.1 | Hs.15871 |
| 260 | 261 | 219382_at | RBT1 | RPA-binding trans-activator | NM_013368.1 | Hs.169138 |
| 262 | 263 | 221865_at | FLJ38045 | hypothetical protein FLJ38045 | BF969986 | Hs.170226 |
| 264 | 265 | 209345_s_at | PI4KII | phosphatidylinositol 4-kinase type II | AL561930 | Hs.25300 |
| 266 | 267 | 207543_s_at | P4HA1 | procollagen-proline, 2-oxoglutarate 4-dioxygenase | NM_000917.1 | Hs.76768 |
| | | | | (proline 4-hydroxylase), alpha polypeptide I | | |
| 268 | 269 | 201193_at | IDH1 | isocitrate dehydrogenase 1 (NADP+), soluble | NM_005896.1 | Hs.11223 |
| 270 | 271 | 216041_x_at | GRN | granulin | AK023348.1 | Hs.180577 |
| 272 | 273 | 208843_s_at | GORASP2 | golgi reassembly stacking protein 2, 55 kDa | BC001408.1 | Hs.6880 |
| 274 | 275 | 200749_at | RAN | RAN, member RAS oncogene family | BF112006 | Hs.10842 |
| 276 | 277 | 60471_at | RIN3 | Ras and Rab interactor 3 | AA625133 | Hs.180040 |
| 278 | 279 | 221485_at | B4GALT5 | UDP-Gal: betaGlcNAc beta | NM_004776.1 | Hs.107526 |
| | | | | 1,4-galactosyltransferase, polypeptide 5 | | |
| 280 | 281 | 214002_at | MYL6 | myosin, light polypeptide 6, | AA419227 | Hs.77385 |
| | | | | alkali, smooth muscle and non-muscle | | |
| 282 | 283 | 218723_s_at | RGC32 | RGC32 protein | NM_014059.1 | Hs.76640 |
| 284 | 285 | 214669_x_at | | Homo sapiens isolate donor N clone N168K | BG485135 | Hs.306357 |
| | | | | immunoglobulin kappa light chain variable | | |
| | | | | region mRNA, partial cds | | |
| 286 | 287 | 218218_at | DIP13B | DIP13 beta | NM_018171.1 | Hs.107882 |
| 288 | 289 | 217949_s_at | IMAGE3455200 | hypothetical protein IMAGE3455200 | NM_024006.1 | Hs.324844 |
| 290 | 291 | 203710_at | ITPR1 | inositol 1,4,5-triphosphate receptor, type 1 | NM_002222.1 | Hs.198443 |
| 292 | 293 | 220661_s_at | FLJ20531 | hypothetical protein FLJ20531 | NM_017865.1 | Hs.23617 |
| 294 | 295 | 203458_at | SPR | sepiapterin reductase (7,8-dihydrobiopterin: | AI951454 | Hs.301540 |
| | | | | NADP+ oxidoreductase) | | |
| 296 | 297 | 216207_x_at | IGKC | immunoglobulin kappa constant | AW408194 | Hs.156110 |
| 298 | 299 | 201377_at | KIAA0144 | KIAA0144 gene product | NM_014847.1 | Hs.8127 |
| 300 | 301 | 208073_x_at | TTC3 | tetratricopeptide repeat domain 3 | NM_003316.1 | Hs.118174 |
| 71 | 72 | 204063_s_at | ULK2 | unc-51-like kinase 2 (C. elegans) | NM_014683.1 | Hs.151406 |
| 302 | 303 | 212160_at | | ESTs, Highly similar to XPOT_HUMAN Exportin T | AI984005 | Hs.380785 |
| | | | | (tRNA exportin) (Exportin(tRNA)) [H. sapiens] | | |
| 304 | 305 | 218205_s_at | MKNK2 | MAP kinase-interacting serine/threonine kinase 2 | NM_017572.1 | Hs.261828 |
| 306 | 307 | 204781_s_at | TNFRSF6 | tumor necrosis factor receptor superfamily, member 6 | NM_000043.1 | Hs.82359 |
| 308 | 309 | 202404_s_at | COL1A2 | collagen, type I, alpha 2 | NM_000089.1 | Hs.179573 |
| 310 | 311 | 204615_x_at | IDI1 | isopentenyl-diphosphate delta isomerase | NM_004508.1 | Hs.76038 |
| 312 | 313 | 200068_s_at | CANX | calnexin | M94859.1 | Hs.155560 |
| 314 | 315 | 212595_s_at | DAZAP2 | DAZ associated protein 2 | AL534321 | Hs.75416 |
| 316 | 317 | 219458_s_at | FLJ22609 | hypothetical protein FLJ22609 | NM_022072.1 | Hs.18740 |
| 318 | 319 | 204787_at | Z39IG | Ig superfamily protein | NM_007268.1 | Hs.8904 |
| 320 | 321 | 202034_x_at | RB1CC1 | RB1-inducible coiled-coil 1 | NM_014781.1 | Hs.50421 |
| 322 | 323 | 201178_at | FBXO7 | F-box only protein 7 | NM_012179.1 | Hs.5912 |
| 324 | 325 | 214687_x_at | ALDOA | aldolase A, fructose-bisphosphate | AK026577.1 | Hs.273415 |
| 33 | 34 | 210299_s_at | FHL1 | four and a half LIM domains 1 | AF063002.1 | Hs.239069 |
| 326 | 327 | 202146_at | IFRD1 | interferon-related developmental regulator 1 | AA747426 | Hs.7879 |
| 328 | 329 | 218241_at | GOLGA5 | golgi autoantigen, golgin subfamily a, 5 | NM_005113.1 | Hs.241572 |
| 330 | 331 | 221004_s_at | ITM3 | integral membrane protein 3 | NM_030926.1 | Hs.111577 |
| 332 | 333 | 201160_s_at | CSDA | cold shock domain protein A | AL556190 | Hs.198726 |
| 334 | 335 | 211139_s_at | NAB1 | NGFI-A binding protein 1 (EGR1 binding protein 1) | AF045452.1 | Hs.107474 |
| 336 | 337 | 214211_at | FTH1 | ferritin, heavy polypeptide 1 | AA083483 | Hs.62954 |
| 93 | 94 | 214366_s_at | ALOX5 | arachidonate 5-lipoxygenase | AA995910 | Hs.89499 |
| 338 | 339 | 204271_s_at | EDNRB | endothelin receptor type B | M74921.1 | Hs.82002 |
| 3 | 4 | 200966_x_at | ALDOA | aldolase A, fructose-bisphosphate | NM_000034.1 | Hs.273415 |
| 340 | 341 | 200711_s_at | TCEB1L | transcription elongation factor B (SIII), polypeptide 1-like | NM_003197.2 | Hs.171626 |
| 342 | 343 | 218107_at | FLJ21016 | hypothetical protein FLJ21016 | NM_025160.1 | Hs.289069 |
| 344 | 345 | 212433_x_at | RPS2 | ribosomal protein S2 | AA630314 | Hs.356360 |
| 346 | 347 | 202953_at | C1QB | complement component 1, q subcomponent, beta polypeptide | NM_000491.2 | Hs.8986 |
| 348 | 349 | 219117_s_at | FKBP11 | FK506 binding protein 11, 19 kDa | NM_016594.1 | Hs.24048 |
| 350 | 351 | 221704_s_at | FLJ12750 | hypothetical protein FLJ12750 | BC005882.1 | Hs.77870 |
| 353 | 354 | 202375_at | SEC24D | SEC24 related gene family, member D (S. cerevisiae) | NM_014822.1 | Hs.19822 |
| 355 | 356 | 202983_at | SMARCA3 | SWI/SNF related, matrix associated, actin dependent | AI760760 | Hs.3068 |
| | | | | regulator of chromatin, subfamily a, member 3 | | |
| 357 | 358 | 200652_at | SSR2 | signal sequence receptor, beta | NM_003145.2 | Hs.74564 |
| | | | | (translocon-associated protein beta) | | |
| 359 | 360 | 209032_s_at | IGSF4 | immunoglobulin superfamily, member 4 | AF132811.1 | Hs.70337 |
| 361 | 362 | 203845_at | PCAF | p300/CBP-associated factor | AV727449 | Hs.199061 |
| 363 | 364 | 209833_at | CRADD | CASP2 and RIPK1 domain containing adaptor | U79115.1 | Hs.155566 |
| | | | | with death domain | | |
| 95 | 96 | 214135_at | CLDN18 | claudin 18 | BE551219 | Hs.278966 |
| 365 | 366 | 201063_at | RCN1 | reticulocalbin 1, EF-hand calcium binding domain | NM_002901.1 | Hs.167791 |
| 367 | 368 | 205661_s_at | PP591 | hypothetical protein PP591 | NM_025207.1 | Hs.118666 |
| 369 | 370 | 218130_at | MGC4368 | hypothetical protein MGC4368 | NM_024510.1 | Hs.9732 |
| 371 | 372 | 212285_s_at | AGRN | agrin | AF016903.1 | Hs.273330 |
| 67 | 68 | 203883_s_at | Rab11-FIP2 | KIAA0941 protein | BG249608 | Hs.173656 |
| 373 | 374 | 218163_at | MCT-1 | MCT-1 protein | NM_014060.1 | Hs.102696 |
| 45 | 46 | 208881_x_at | IDI1 | isopentenyl-diphosphate delta isomerase | BC005247.1 | Hs.76038 |
| 375 | 376 | 200705_s_at | EEF1B2 | eukaryotic translation elongation factor 1 beta 2 | NM_001959.1 | Hs.275959 |
| 377 | 378 | 202386_s_at | | Homo sapiens KIAA0430 gene product (KIAA0430), mRNA | NM_019081.1 | Hs.30909 |
| 379 | 380 | 212143_s_at | IGFBP3 | insulin-like growth factor binding protein 3 | NM_000598.1 | Hs.77326 |
| 79 | 80 | 201997_s_at | SHARP | SMART/HDAC1 associated repressor protein | NM_015001.1 | Hs.184245 |
| 381 | 382 | 204396_s_at | GPRK5 | G protein-coupled receptor kinase 5 | NM_005308.1 | Hs.211569 |
| 383 | 384 | 200599_s_at | TRA1 | tumor rejection antigen (gp96) 1 | NM_003299.1 | Hs.82689 |
| 55 | 56 | 201432_at | CAT | catalase | NM_001752.1 | Hs.76359 |
| 65 | 66 | 214752_x_at | FLNA | filamin A, alpha (actin binding protein 280) | AI625550 | Hs.195464 |
| 53 | 54 | 219282_s_at | TRPV2 | transient receptor potential cation channel, | NM_015930.1 | Hs.279746 |
| | | | | subfamily V, member 2 | | |
| 385 | 386 | 203802_x_at | WBSCR20A | Williams Beuren syndrome chromosome region 20A | NM_018044.1 | Hs.272820 |
| 387 | 388 | 202732_at | PKIG | protein kinase (cAMP-dependent catalytic) inhibitor gamma | NM_007066.1 | Hs.3407 |
| 389 | 390 | 202766_s_at | FBN1 | fibrillin 1 (Marfan syndrome) | NM_000138.1 | Hs.750 |
| 391 | 392 | 201091_s_at | CBX3 | chromobox homolog 3 (HP1 gamma homolog, Drosophila) | BE748755 | Hs.278554 |
| 393 | 394 | 201874_at | FLJ21047 | hypothetical protein FLJ21047 | BF978611 | Hs.14891 |
| 395 | 396 | 204867_at | GCHFR | GTP cyclohydrolase I feedback regulatory protein | NM_005258.2 | Hs.83081 |
| 397 | 398 | 206875_s_at | SLK | Ste20-related serine/threonine kinase | NM_014720.1 | Hs.105751 |
| 399 | 400 | 210645_s_at | TTC3 | tetratricopeptide repeat domain 3 | D83077.1 | Hs.118174 |
| 47 | 48 | 202310_s_at | COL1A1 | collagen, type I, alpha 1 | NM_000088.1 | Hs.172928 |
| 37 | 38 | 201535_at | UBL3 | ubiquitin-like 3 | NM_007106.1 | Hs.173091 |

[0225] TABLE 3
Lung Tumor Marker (Set Three)

| SEQ | SEQ | | | | | |
|---|---|---|---|---|---|---|
| ID NO | ID NO | | Gene | | Genbank | Unigene |
| (DNA) | (Protein) | Probe Set | Symbol | Title | Accession | Cluster |
| 226 | 227 | 213693_s_at | MUC1 | mucin 1, transmembrane | AI610869 | Hs.89603 |
| 228 | 229 | 201973_s_at | LOC51622 | CGI-43 protein | AL550875 | Hs.289112 |
| 230 | 231 | 202948_at | IL1R1 | interleukin 1 receptor, type I | NM_000877.1 | Hs.82112 |
| 232 | 233 | 204619_s_at | CSPG2 | chondroitin sulfate proteoglycan 2 (versican) | BF590263 | Hs.81800 |
| 234 | 235 | 204017_at | KDELR3 | KDEL (Lys-Asp-Glu-Leu) endoplasmic reticulum protein | NM_006855.2 | Hs.250696 |
| | | | | retention receptor 3 | | |
| 236 | 237 | 201231_s_at | ENO1 | enolase 1, (alpha) | NM_001428.1 | Hs.254105 |
| 238 | 239 | 200699_at | | ESTs, Weakly similar to A43932 mucin 2 precursor, | NM_006854.2 | Hs.380986 |
| | | | | intestinal - human (fragments) [H. sapiens] | | |
| 240 | 241 | 200594_x_at | HNRPU | heterogeneous nuclear ribonucleoprotein U | NM_004501.1 | Hs.103804 |
| | | | | (scaffold attachment factor A) | | |
| 242 | 243 | 218194_at | DKFZP566E144 | small fragment nuclease | NM_015523.1 | Hs.7527 |
| 244 | 245 | 212842_x_at | RANBP2L1 | RAN binding protein 2-like 1 | AL043571 | Hs.179825 |
| 246 | 247 | 216640_s_at | P5 | protein disulfide isomerase-related protein | AK026926.1 | Hs.182429 |
| 248 | 249 | 212041_at | ATP6V0D1 | ATPase, H+ transporting, lysosomal 38 kDa, V0 | AL566172 | Hs.106876 |
| | | | | subunit d isoform 1 | | |
| 250 | 251 | 218167_at | LOC51321 | hypothetical protein LOC51321 | NM_016627.1 | Hs.268122 |
| 252 | 253 | 209274_s_at | MGC4276 | hypothetical protein MGC4276 similar to CG8198 | BC002675.1 | Hs.177776 |
| 254 | 255 | 208742_s_at | SAP18 | sin3-associated polypeptide, 18 kDa | U78303.1 | Hs.23964 |
| 256 | 257 | 205034_at | CCNE2 | cyclin E2 | NM_004702.1 | Hs.30464 |
| 258 | 259 | 218795_at | ACP6 | lysophosphatidic acid phosphatase | NM_016361.1 | Hs.15871 |
| 260 | 261 | 219382_at | RBT1 | RPA-binding trans-activator | NM_013368.1 | Hs.169138 |
| 262 | 263 | 221865_at | FLJ38045 | hypothetical protein FLJ38045 | BF969986 | Hs.170226 |
| 264 | 265 | 209345_s_at | PI4KII | phosphatidylinositol 4-kinase type II | AL561930 | Hs.25300 |
| 266 | 267 | 207543_s_at | P4HA1 | procollagen-proline, 2-oxoglutarate 4-dioxygenase | NM_000917.1 | Hs.76768 |
| | | | | (proline 4-hydroxylase), alpha polypeptide I | | |
| 268 | 269 | 201193_at | IDH1 | isocitrate dehydrogenase 1 (NADP+), soluble | NM_005896.1 | Hs.11223 |
| 270 | 271 | 216041_x_at | GRN | granulin | AK023348.1 | Hs.180577 |
| 272 | 273 | 208843_s_at | GORASP2 | golgi reassembly stacking protein 2, 55 kDa | BC001408.1 | Hs.6880 |
| 274 | 275 | 200749_at | RAN | RAN, member RAS oncogene family | BF112006 | Hs.10842 |
| 276 | 277 | 60471_at | RIN3 | Ras and Rab interactor 3 | AA625133 | Hs.180040 |
| 278 | 279 | 221485_at | B4GALT5 | UDP-Gal: betaGlcNAc beta 1,4-galactosyltransferase, | NM_004776.1 | Hs.107526 |
| | | | | polypeptide 5 | | |
| 280 | 281 | 214002_at | MYL6 | myosin, light polypeptide 6, alkali, smooth | AA419227 | Hs.77385 |
| | | | | muscle and non-muscle | | |
| 282 | 283 | 218723_s_at | RGC32 | RGC32 protein | NM_014059.1 | Hs.76640 |
| 284 | 285 | 214669_x_at | | Homo sapiens isolate donor N clone N168K | BG485135 | Hs.306357 |
| | | | | immunoglobulin kappa light chain variable | | |
| | | | | region mRNA, partial cds | | |
| 286 | 287 | 218218_at | DIP13B | DIP13 beta | NM_018171.1 | Hs.107882 |
| 288 | 289 | 217949_s_at | IMAGE3455200 | hypothetical protein IMAGE3455200 | NM_024006.1 | Hs.324844 |
| 290 | 291 | 203710_at | ITPR1 | inositol 1,4,5-triphosphate receptor, type 1 | NM_002222.1 | Hs.198443 |
| 292 | 293 | 220661_s_at | FLJ20531 | hypothetical protein FLJ20531 | NM_017865.1 | Hs.23617 |
| 294 | 295 | 203458_at | SPR | sepiapterin reductase (7,8-dihydrobiopterin: | AI951454 | Hs.301540 |
| | | | | NADP+ oxidoreductase) | | |
| 296 | 297 | 216207_x_at | IGKC | immunoglobulin kappa constant | AW408194 | Hs.156110 |
| 298 | 299 | 201377_at | KIAA0144 | KIAA0144 gene product | NM_014847.1 | Hs.8127 |
| 300 | 301 | 208073_x_at | TTC3 | tetratricopeptide repeat domain 3 | NM_003316.1 | Hs.118174 |
| 71 | 72 | 204063_s_at | ULK2 | unc-51-like kinase 2 (C. elegans) | NM_014683.1 | Hs.151406 |
| 302 | 303 | 212160_at | | ESTs, Highly similar to XPOT_HUMAN Exportin | AI984005 | Hs.380785 |
| | | | | T (tRNA exportin) (Exportin(tRNA)) [H. sapiens] | | |
| 304 | 305 | 218205_s_at | MKNK2 | MAP kinase-interacting serine/threonine kinase 2 | NM_017572.1 | Hs.261828 |
| 306 | 307 | 204781_s_at | TNFRSF6 | tumor necrosis factor receptor superfamily, member 6 | NM_000043.1 | Hs.82359 |
| 308 | 309 | 202404_s_at | COL1A2 | collagen, type I, alpha 2 | NM_000089.1 | Hs.179573 |
| 310 | 311 | 204615_x_at | IDI1 | isopentenyl-diphosphate delta isomerase | NM_004508.1 | Hs.76038 |
| 312 | 313 | 200068_s_at | CANX | calnexin | M94859.1 | Hs.155560 |
| 314 | 315 | 212595_s_at | DAZAP2 | DAZ associated protein 2 | AL534321 | Hs.75416 |
| 316 | 317 | 219458_s_at | FLJ22609 | hypothetical protein FLJ22609 | NM_022072.1 | Hs.18740 |
| 318 | 319 | 204787_at | Z39IG | Ig superfamily protein | NM_007268.1 | Hs.8904 |
| 320 | 321 | 202034_x_at | RB1CC1 | RB1-inducible coiled-coil 1 | NM_014781.1 | Hs.50421 |
| 322 | 323 | 201178_at | FBXO7 | F-box only protein 7 | NM_012179.1 | Hs.5912 |
| 324 | 325 | 214687_x_at | ALDOA | aldolase A, fructose-bisphosphate | AK026577.1 | Hs.273415 |
| 33 | 34 | 210299_s_at | FHL1 | four and a half LIM domains 1 | AF063002.1 | Hs.239069 |
| 326 | 327 | 202146_at | IFRD1 | interferon-related developmental regulator 1 | AA747426 | Hs.7879 |
| 328 | 329 | 218241_at | GOLGA5 | golgi autoantigen, golgin subfamily a, 5 | NM_005113.1 | Hs.241572 |
| 330 | 331 | 221004_s_at | ITM3 | integral membrane protein 3 | NM_030926.1 | Hs.111577 |
| 332 | 333 | 201160_s_at | CSDA | cold shock domain protein A | AL556190 | Hs.198726 |
| 334 | 335 | 211139_s_at | NAB1 | NGFI-A binding protein 1 (EGR1 binding protein 1) | AF045452.1 | Hs.107474 |
| 336 | 337 | 214211_at | FTH1 | ferritin, heavy polypeptide 1 | AA083483 | Hs.62954 |
| 93 | 94 | 214366_s_at | ALOX5 | arachidonate 5-lipoxygenase | AA995910 | Hs.89499 |
| 338 | 339 | 204271_s_at | EDNRB | endothelin receptor type B | M74921.1 | Hs.82002 |
| 3 | 4 | 200966_x_at | ALDOA | aldolase A, fructose-bisphosphate | NM_000034.1 | Hs.273415 |
| 340 | 341 | 200711_s_at | TCEB1L | transcription elongation factor B (SIII), polypeptide 1-like | NM_003197.2 | Hs.171626 |
| 342 | 343 | 218107_at | FLJ21016 | hypothetical protein FLJ21016 | NM_025160.1 | Hs.289069 |
| 344 | 345 | 212433_x_at | RPS2 | ribosomal protein S2 | AA630314 | Hs.356360 |
| 346 | 347 | 202953_at | C1QB | complement component 1, q subcomponent, beta polypeptide | NM_000491.2 | Hs.8986 |
| 348 | 349 | 219117_s_at | FKBP11 | FK506 binding protein 11, 19 kDa | NM_016594.1 | Hs.24048 |
| 350 | 351 | 221704_s_at | FLJ12750 | hypothetical protein FLJ12750 | BC005882.1 | Hs.77870 |
| 353 | 354 | 202375_at | SEC24D | SEC24 related gene family, member D (S. cerevisiae) | NM_014822.1 | Hs.19822 |
| 355 | 356 | 202983_at | SMARCA3 | SWI/SNF related, matrix associated, actin dependent | AI760760 | Hs.3068 |
| | | | | regulator of chromatin, subfamily a, member 3 | | |
| 357 | 358 | 200652_at | SSR2 | signal sequence receptor, beta (translocon-associated | NM_003145.2 | Hs.74564 |
| | | | | protein beta) | | |
| 359 | 360 | 209032_s_at | IGSF4 | immunoglobulin superfamily, member 4 | AF132811.1 | Hs.70337 |
| 361 | 362 | 203845_at | PCAF | p300/CBP-associated factor | AV727449 | Hs.199061 |
| 363 | 364 | 209833_at | CRADD | CASP2 and RIPK1 domain containing adaptor | U79115.1 | Hs.155566 |
| | | | | with death domain | | |
| 95 | 96 | 214135_at | CLDN18 | claudin 18 | BE551219 | Hs.278966 |
| 365 | 366 | 201063_at | RCN1 | reticulocalbin 1, EF-hand calcium binding domain | NM_002901.1 | Hs.167791 |
| 367 | 368 | 205661_s_at | PP591 | hypothetical protein PP591 | NM_025207.1 | Hs.118666 |
| 369 | 370 | 218130_at | MGC4368 | hypothetical protein MGC4368 | NM_024510.1 | Hs.9732 |
| 371 | 372 | 212285_s_at | AGRN | agrin | AF016903.1 | Hs.273330 |
| 67 | 68 | 203883_s_at | Rab11-FIP2 | KIAA0941 protein | BG249608 | Hs.173656 |
| 373 | 374 | 218163_at | MCT-1 | MCT-1 protein | NM_014060.1 | Hs.102696 |
| 45 | 46 | 208881_x_at | IDI1 | isopentenyl-diphosphate delta isomerase | BC005247.1 | Hs.76038 |
| 375 | 376 | 200705_s_at | EEF1B2 | eukaryotic translation elongation factor 1 beta 2 | NM_001959.1 | Hs.275959 |
| 377 | 378 | 202386_s_at | | Homo sapiens KIAA0430 gene product (KIAA0430), mRNA | NM_019081.1 | Hs.30909 |
| 379 | 380 | 212143_s_at | IGFBP3 | insulin-like growth factor binding protein 3 | NM_000598.1 | Hs.77326 |
| 79 | 80 | 201997_s_at | SHARP | SMART/HDAC1 associated repressor protein | NM_015001.1 | Hs.184245 |
| 381 | 382 | 204396_s_at | GPRK5 | G protein-coupled receptor kinase 5 | NM_005308.1 | Hs.211569 |
| 383 | 384 | 200599_s_at | TRA1 | tumor rejection antigen (gp96) 1 | NM_003299.1 | Hs.82689 |
| 55 | 56 | 201432_at | CAT | catalase | NM_001752.1 | Hs.76359 |
| 65 | 66 | 214752_x_at | FLNA | filamin A, alpha (actin binding protein 280) | AI625550 | Hs.195464 |
| 53 | 54 | 219282_s_at | TRPV2 | transient receptor potential cation channel, | NM_015930.1 | Hs.279746 |
| | | | | subfamily V, member 2 | | |
| 385 | 386 | 203802_x_at | WBSCR20A | Williams Beuren syndrome chromosome region 20A | NM_018044.1 | Hs.272820 |
| 387 | 388 | 202732_at | PKIG | protein kinase (cAMP-dependent, catalytic) inhibitor gamma | NM_007066.1 | Hs.3407 |
| 389 | 390 | 202766_s_at | FBN1 | fibrillin 1 (Marfan syndrome) | NM_000138.1 | Hs.750 |
| 391 | 392 | 201091_s_at | CBX3 | chromobox homolog 3 (HP1 gamma homolog, Drosophila) | BE748755 | Hs.278554 |
| 393 | 394 | 201874_at | FLJ21047 | hypothetical protein FLJ21047 | BF978611 | Hs.14891 |
| 395 | 396 | 204867_at | GCHFR | GTP cyclohydrolase I feedback regulatory protein | NM_005258.2 | Hs.83081 |
| 397 | 398 | 206875_s_at | SLK | Ste20-related serine/threonine kinase | NM_014720.1 | Hs.105751 |
| 399 | 400 | 210645_s_at | TTC3 | tetratricopeptide repeat domain 3 | D83077.1 | Hs.118174 |
| 47 | 48 | 202310_s_at | COLIA1 | collagen, type I, alpha 1 | NM_000088.1 | Hs.172928 |
| 37 | 38 | 201535_at | UBL3 | ubiquitin-like 3 | NM_007106.1 | Hs.173091 |

The application's sequence listing, which the Patent Office published only in electronic form, follows.

SEQUENCE LISTING (400 sequences)

SEQ ID NO: 1 - DNA, 1863 bp, Homo sapiens
gggggccaaagggaagtgctgcgaggtttacaaccagctgcagtggttcgatgggaaggatctttctccaagtggttcctcttgaggggagcatttctgctggctccaggactttggccatctataaagcttggcaatgagaaataagaaaattctcaaggaggacgagctcttgagtgagacccaacaagctgcttttcaccaaattgcaatggagcctttcgaaatcaatgttccaaagcccaagaggagaaatggggtgaacttctccctagctgtggtggtcatctacctgatcctgctcaccgctggcgctgggctgctggtggtccaagttctgaatctgcaggcgcggctccgggtcctggagatgtatttcctcaatgacactctggcggctgaggacagcccgtccttctccttgctgcagtcagcacaccctggagaacacctggctcagggtgcatcgaggctgcaagtcctgcaggcccaactcacctgggtccgcgtcagccatgagcacttgctgcagcgggtagacaacttcactcagaacccagggatgttcagaatcaaaggtgaacaaggcgccccaggtcttcaaggccacaagggggccatgggcatgcctggtgcccctggcccgccgggaccacctgctgagaagggagccaagggggctatgggacgagatggagcaacaggcccctcgggaccccaaggcccaccgggagtcaagggagaggcgggcctccaaggaccccagggtgctccagggaagcaaggagccactggcaccccaggaccccaaggagagaagggcagcaaaggcgatgggggtctcattggcccaaaaggggaaactggaactaagggagagaaaggagacctgggtctcccaggaagcaaaggggacaggggcatgaaaggagatgcaggggtcatggggcctcctggagcccaggggagtaaaggtgacttcgggaggccaggcccaccaggtttggctggttttcctggagctaaaggagatcaaggacaacctggactgcagggtgttccgggccctcctggtgcagtgggacacccaggtgccaagggtgagcctggcagtgctggctcccctgggcgagcaggacttccagggagccccgggagtccaggagccacaggcctgaaaggaagcaaaggggacacaggacttcaaggacagcaaggaagaaaaggagaatcaggagttccaggccctgcaggtgtgaagggagaacaggggagcccagggctggcaggtcccaagggagcccctggacaagctggccagaagggagaccagggagtgaaaggatcttctggggagcaaggagtaaagggagaaaaaggtgaaagaggtgaaaactcagtgtccgtcaggattgtcggcagtagtaaccgaggccgggctgaagtttactacagtggtacctgggggacaatttgcgatgacgagtggcaaaattctgatgccattgtcttctgccgcatgctgggttactccaaaggaagggccctgtacaaagtgggagctggcactgggcagatctggctggataatgttcagtgtcggggcacggagagtaccctgtggagctgcaccaagaatagctggggccatcatgactgcagccacgaggaggacgcaggcgtggagtgcagcgtctgacccggaaaccctttcacttctctgctcccgaggtgtcctcgggctcatatgtgggaaggcagaggatctctgaggagttccctggggacaactgagcagcctctggagaggggccattaataaagctcaacatcaaaaaaaaaaaagaaaaaaaaaaaaaaaaa

SEQ ID NO: 2 - protein, 520 aa, homo sapiens
MRNKKILKEDELLSETQQAAFHQIAMEPFEINVPKPKRRNGVNFSLAVVVIYLILLTAGAGLLVVQVLNLQARLRVLEMYFLNDTLAAEDSPSFSLLQSAHPGEHLAQGASRLQVLQAQLTWVRVSHEHLLQRVDNFTQNPGMFRIKGEQGAPGLQGHKGAMGMPGAPGPPGPPAEKGAKGAMGRDGATGPSGPQGPPGVKGEAGLQGPQGAPGKQGATGTPGPQGEKGSKGDGGLIGPKGETGTKGEKGDLGLPGSKGDRGMKGDAGVMGPPGAQGSKGDFGRPGPPGLAGFPGAKGDQGQPGLQGVPGPPGAVGHPGAKGEPGSAGSPGRAGLPGSPGSPGATGLKGSKGDTGLQGQQGRKGESGVPGPAGVKGEQGSPGLAGPKGAPGQAGQKGDQGVKGSSGEQGVKGEKGERGENSVSVRIVGSSNRGRAEVYYSGTWGTICDDEWQNSDAIVFCRMLGYSKGRALYKVGAGTGQIWLDNVQCRGTESTLWSCTKNSWGHHDCSHEEDAGVECSV

SEQ ID NO: 3 - DNA, 816 bp, Homo sapiens
  misc_feature (293)..(293): n is a, c, g, or t
  misc_feature (509)..(509): n is a, c, g, or t
  misc_feature (534)..(534): n is a, c, g, or t
  misc_feature (624)..(624): n is a, c, g, or t
  misc_feature (657)..(657): n is a, c, g, or t
  misc_feature (671)..(671): n is a, c, g, or t
ttttgctaaacatttttttaagtatgagtccttgtttaaaaagaaaagattaaaacagaaaatattttctataaataatacatgtattttggttttagtgctcccgccctaaggtttgaagtttacttttatccagtacctttttcctccatgatcacctttttttctctttcccctctcccactcgtgcacacgtgggggtttctgcgagaattggccttgctgcactgtgattggcgaagacgtgaaactttttaaaaaaaatacttaaaattggttcttttgtttcattntgtgtatttgaagttttagttatcctcagactcctcttctgcttcccgcagccacgtgaagaatgccgtgacagatttcagagccacgcccttcccattctgctctgcagggtccttgctgctctcccatttgtagaaggcatcctcggagatcacctcctcgtcatatagacaatcaaaaaacatccgcagcacattggcaggttgatcaagttntactatcgatgcttgtagtgcatanagtgcttgcagttccttctctgtatctgagtctaggtacttgagtaagatcggcactctctgcttgataacagcagtgtccactctgaangtagaagagtcggctataatagctgctttacanacagcagtcattanagctctaacgaatgtagtgaactcatctggatttcgtctagattagcctctacccagtcaaagatctgtcatcattcgctttgctctcaattatgagtttctcgagttgcttatgcaggtcttccgcagacaagtctttctttga

SEQ ID NO: 4 - protein, 1585 aa, Homo sapiens
MNSQPQTRSPFFQRPQIQPPRATIPNSSPSIRPGAQTPTAVYQANQHIMMVNHLPMPYPVPQGPQYCIPQYRHSGPPYVGPPQQYPVQPPGPGPFYPGPGPGDFPNAYGTPFYPSQPVYQSAPIIVPTQQQPPPAKREKKTIRIRDPNQGGKDITEEIMSGGGSRNPTPPIGRPTSTPTPPQQLPSQVPEHSPVVYGTVESAHLAASTPVTAASDQKQEEKPKPDPVLKSPSPVLRLVLSGEKKEQEGQTSETTAIVSIAELPLPPSPTTVSSVARSTIAAPTSSALSSQPIFTTAIDDRCELSSPREDTIPIPSLTSCTETSDPLPTNENDDDICKKPCSVAPNDIPLVSSTNLINEINGVSEKLSATESIVEIVKQEVLPLTLELEILENPPEEMKLECIPAPITPSTVPSFPPTPPTPPASPPHTPVIVPAAATTVSSPSAAITVQRVLEEDESIRTCLSEDAKEIQNKIEVEADGQTEEILDSQNLNSRRSPVPAQIAITVPKTWKKPKDRTRTTEEMLEAELELKAEEELSIDKVLESEQDKMSQGFHPERDPSDLKKVKAVEENGEEAEPVRNGAESVSEGEGIDANSGSTDSSGDGVTFPFKPESWKPTDTEGKKQYDREFLLDFQFMPACIQKPEGLPPISDVVLDKINQPKLPMRTLDPRILPRGPDFTPAFADFGRQTPGGRGVPLLNVGSRRSQPGQRREPRKIITVSVKEDVHLKKAENAWKPSQKRDSQADDPENIKTQELFRKVRSILNKLTPQMFNQLMKQVSGLTVDTEERLKGVIDLVFEKAIDEPSFSVAYANMCRCLVTLKVPMADKPGNTVNFRKLLLNRCQKEFEKDKADDDVFEKKQKELEAASAPEERTRLHDELEEAKDKARRRSIGNIKFIGELFKLKMLTEAIMHDCVVKLLKNHDEESLECLCRLLTTIGKDLDFEKAKPRMDQYFNQMEKIVKERKTSSRIRFMLQDVIDLRLCNWVSRRADQGPKTIEQIHKEAKIEEQEEQRKVQQLMTKEKRRPGVQRVDEGGWNTVQGAKNSRVLDPSKFLKITKPTIDEKIQLVPKAQLGSWGKGSSGGAKASETDALRSSASSLNRFSALQPPAPSGSTPSTPVEFDSRRTLTSRGSMGREKNDKPLPSATARPNTFMRGGSSKDLLDNQSQEEQRREMLETVKQLTGGVDVERNSTEAERNKTRESAKPEISAMSAHDKAALSEEELERKSKSIIDEFLHINDFKEAMQCVEELNAQGLLHVFVRVGVESTLERSQITRDHMGQLLYQLVQSEKLSKQDFFKGFSETLELADDMAIDIPHIWLYLAELVTPMLKEGGISMRELTIEFSKPLLPVGRAGVLLSEILHLLCKQMSHKKVGALWREADLSWKDFLPEGEDVHNFLLEQKLDFIESDSPCSSEALSKKELSAEELYKRLEKLIIEDKANDEQIFDWVEANLDEIQMSSPTFLRALMTAVCKAAIIADSSTFRVDTAVIKQRVPILLKYLDSDTEKELQALYALQASIVKLDQPANLLRMFFDCLYDEEVISEDAFYKWESSKDPAEQNGKGVALKSVTAFFTWLREAEEESEDN

SEQ ID NO: 5 - DNA, 2967 bp, Homo sapiens
ccggaactgcagttgctgctgcagctgaggtacagcggcggtttctgaggttcttcactcgcgactgacggagctgcggtggcgtctccacacgcaaccatgaagttgaaggacacaaaatcaaggccaaagcagtcaagctgtggcaaatttcagacaaagggaatcaaagttgtgggaaaatggaaggaagtgaagattgacccaaatatgtttgcagatggacagatggatgacttggtgtgctttgaggaattgacagattaccagttggtctcccctgccaagaatccctccagtctcttctcaaaggaagcacccaagagaaaggcacaagctgtttcagaagaagaggaggaggaggagggaaagtctagctcaccaaagaaaaagatcaagttgaagaaaagtaaaaatgtagcaactgaaggaaccagtacccagaaagaatttgaagtgaaagatcctgagctggaggcccagggagatgacatggtttgtgatgatccggaggctggggagatgacatcagaaaacctggtccaaactgctccaaaaaagaagaaaaataaagggaaaaaagggttggagccttctcagagcactgctgccaaggtgcccaaaaaagcgaagacatggattcctgaagttcatgatcagaaagcagatgtgtcagcttggaaggacctgtttgttcccaggccggttctccgagcactcagctttctaggcttctctgcacccacaccaatccaagccctgaccttggcacctgccatccgtgacaaactggacatccttggggctgctgagacaggaagtgggaaaactcttgcctttgccatcccaatgattcatgcggtgttgcagtggcagaagaggaatgctgcccctcctccaagtaacaccgaagcaccacctggagagaccagaactgaggccggagctgagactagatcaccaggcaaggctgaagctgagtctgatgcattgcctgacgatactgtaattgagagtgaagcactgcccagtgatattgcagccgaggccagagccaagactggaggcactgtctcagaccaggcgttgctctttggtgacgatgatgctggtgaagggccttcttccctgatcagggagaaacctgttcccaaacagaatgagaatgaggaggaaaatcttgataaagagcagactggaaatctaaaacaggagttggatgacaaaagcgccacctgtaaggcatatccaaagcgtcctctgcttggactggttctgactcccactcgagagctggccgtccaggtcaaacagcacattgatgctgtggccaggtttacaggaattaaaactgctattttggttggtggaatgtccacgcagaaacagcagaggatgctgaaccgtcgtcctgagattgtggttgctactccaggccggctgtgggaattaattaaagaaaagcattatcatttgaggaaccttcggcagctcaggtgcctggtagtggatgaggctgaccggatggttgagaaaggccattttgctgagctctcacagctgctagagatgctcaatgactcccaatacaacccaaagagacaaacgcttgttttttctgccacactcaccctggtgcatcaggctcctgctcgaatccttcataagaagcacaccaagaaaatggataaaacagccaaacttgacctccttatgcagaaaattggcatgaggggcaagcccaaggtcattgacctcacaaggaatgaggccacggtggagacgctaacagagaccaagatccattgtgagactgatgagaaagacttctacttgtactacttcctgatgcagtatccaggccgcagcttagtgtttgccaacagtatctcctgcatcaaacgcctctctgggctcctcaaagtccttgatatcatgcccttgaccctgcatgcctgtatgcaccagaagcagaggctcagaaacctggagcagtttgcccgtctggaagactgtgttctcttggcaacagatgtggcagctcggggtctggatattcctaaagtccagcatgtcatccattaccaggtcccacgtacctcggagatttatgtccaccgaagtggtcgaactgctcgagctaccaatgaaggcctcagtctgatgctcattgggcctgaggatgtgatcaactttaagaagatttacaaaacgctcaagaaagatgaggatatcccactgttccccgtgcagacaaaatacatggatgtggtcaaggagcgaatccgtttagctcgacagattgagaaatctgagtatcggaacttccaggcttgcctgcacaactcttggattgagcaggcagcagctgccctggagattgagctggaagaagacatgtataagggaggaaaagctgaccagcaagaagaacgtcggagacaaaagcagatgaaggttctgaagaaggagctgcgccacctgctgtcccagccactgtttacggagagccagaaaaccaagtatcccactcagtctggcaagccgcccctgcttgtgtctgccccaagtaagagcgagtctgctttgagctgtctctccaagcagaagaagaagaagacaaagaagccgaaggagccacagccggaacagccacagccaagtacaagtgcaaattaactggtcaagtgtgtcagtgactgcacattggtttctgttctctggctatttgcaaaacctctcccacccttgtgtttcactccaccaccaaccccaggtaaaaaagtctccctctcttccactcacacccatagcgggagagacctcatgcagatttgcattgttttggagtaagaattcaatgcagcagcttaatttttctgtattgcagtgtttataggcttcttgtgtgttaaacttgatttcataaattaaaaacaatggtcagaaaaaaaaaaaaaaaaaaaa

SEQ ID NO: 6 - protein, 859 aa, Homo sapiens
MKLKDTKSRPKQSSCGKFQTKGIKVVGKWKEVKIDPNMFADGQMDDLVCFEELTDYQLVSPAKNPSSLFSKEAPKRKAQAVSEEEEEEEGKSSSPKKKIKLKKSKNVATEGTSTQKEFEVKDPELEAQGDDMVCDDPEAGEMTSENLVQTAPKKKKNKGKKGLEPSQSTAAKVPKKAKTWIPEVHDQKADVSAWKDLFVPRPVLRALSFLGFSAPTPIQALTLAPAIRDKLDILGAAETGSGKTLAFAIPMIHAVLQWQKRNAAPPPSNTEAPPGETRTEAGAETRSPGKAEAESDALPDDTVIESEALPSDIAAEARAKTGGTVSDQALLFGDDDAGEGPSSLIREKPVPKQNENEEENLDKEQTGNLKQELDDKSATCKAYPKRPLLGLVLTPTRELAVQVKQHIDAVARFTGIKTAILVGGMSTQKQQRMLNRRPEIVVATPGRLWELIKEKHYHLRNLRQLRCLVVDEADRMVEKGHFAELSQLLEMLNDSQYNPKRQTLVFSATLTLVHQAPARILHKKHTKKMDKTAKLDLLMQKIGMRGKPKVIDLTRNEATVETLTETKIHCETDEKDFYLYYFLMQYPGRSLVFANSISCIKRLSGLLKVLDIMPLTLHACMHQKQRLRNLEQFARLEDCVLLATDVAARGLDIPKVQHVIHYQVPRTSEIYVHRSGRTARATNEGLSLMLIGPEDVINFKKIYKTLKKDEDIPLFPVQTKYMDVVKERIRLARQIEKSEYRNFQACLHNSWIEQAAAALEIELEEDMYKGGKADQQEERRRQKQMKVLKKELRHLLSQPLFTESQKTKYPTQSGKPPLLVSAPSKSESALSCLSKQKKKKTKKPKEPQPEQPQPSTSAN

SEQ ID NO: 7 - DNA, 600 bp, Homo sapiens
  misc_feature (377)..(377): n is a, c, g, or t
gcatccagttgacaagacatttaaggtgtttatcaggatcatgccctggccccagcttcccaataccagctgttgaaaagattctctctcatctggagagaactggagtgcacagttcacccacgtggctccgggttattagttactgtgggctggtcttggtcagaggcatctgcagctggagtcacagctggacttgcagtggacgtggcagtgtctggggaggcctgggatggtcttggagggggatcgcttgctgagacagactggaaatactgcacagtccaggcgatcaatatggatagcagaaaggttcccagaaagtagatcagggctgagtgcaggatacaccccagagaagccgcaagtgcaggtanagccaggccaaggagcaggggctgaaggactcctcgttactgtggctccagacctttcgtacagtcctggagatggagatgtattagatggagattgagtcatttcaagaatccagatatggtgtggatatcggacatctcgatagcaggacagttaaaaatcctggagtctcatcaggcggctggcgtaattgacaacactcagtctgtacggttggtgcaa

SEQ ID NO: 8 - protein, 979 aa, Homo sapiens
MVYRDDYFIRHSISVSAVIVRAWITHKYSGRDWNVKWEENLLHAVAKNYTLLQTIPPFERPFKDHQVCLEWNMGYIWNLRANRIPQCPLENDVVALLGFPYASSGENTGIVKKFPRFRNRELEATRRQRMDYPVFTVSLWLYLLHYCKANLCGILYFVDSNEMYGTPSVFLTEEGYLHIQMHLVKGEDLAVKTKFIIPLKEWFRLDISFNGGQIVVTTSIGQDLKSYHNQTISFREDFHYNDTAGYFIIGGSRYVAGIEGFFGPLKYYRLRSLHPAQIFNPLLEKQLAEQIKLYYERCAEVQEIVSVYASAAKHGGERQEACHLHNSYLDLQRRYGRPSMCRAFPWEKELKDKHPSLFQALLEMDLLTVPRNQNESVSEIGGKIFEKAVKRLSSIDGLHQISSIVPFLTDSSCCGYHKASYYLAVFYETGLNVPRDQLQGMLYSLVGGQGSERLSSMNLGYKHYQGIDNYPLDWELSYAYYSNIATKTPLDQHTLQGDQAYVETIRLKDDEILKVQTKEDGDVFMWLKHEATRGNAAAQQRLAQMLFWGQQGVAKNPEAAIEWYAKGALETEDPALIYDYAIVLFKGQGVKKNRRLALELMKKAASKGLHQAVNGLGWYYHKFKKNYAKAAKYWLKAEEMGNPDASYNLGVLHLDGIFPGVPGRNQTLAGEIFHKAAQGGHMEGTLWCSLYYITGNLETFPRDPEKAVVWAKHVAEKNGYLGHVIRKGLNAYLEGSWHEALLYYVLAAETGIEVSQTNLAHICEERPDLARRYLGVNCVWRYYNFSVFQIDAPSFAYLKMGDLYYYGHQNQSQDLELSVQMYAQAALDGDSQGFFNLALLIEEGTIIPHHILDFLEIDSTLHSNNISILQELYERCWSHSNEESFSPCSLAWLYLHLRLLWGAILHSALIYFLGTFLLSILIAWTVQYFQSVSASDPPPRPSQASPDTATSTASPAVTPAADASDQDQPTVTNNPEPRG

SEQ ID NO: 9 - DNA, 2662 bp, Homo sapiens
ctcctcccgggcgggataattgaacggcgcggccctggcccagcgttggctgccgaggctcggccggagcgtggagcccgcgccgctgccccaggaccgcgcccgcgcctttgtccgccgccgcccaccgcccgtcgcccgccgcccatggagcgcgccgcgccgtcgcgccgggtcccgcttccgctgctgctgctcggcggccttgcgctgctggcggccggagtggacgcggatgtcctcctggaggcctgctgtgcggacggacaccggatggccactcatcagaaggactgctcgctgccatatgctacggaatccaaagaatgcaggatggtgcaggagcagtgctgccacagccagctggaggagctgcactgtgccacgggcatcagcctggccaacgagcaggaccgctgtgccacgccccacggtgacaacgccagcctggaggccacatttgtgaagaggtgctgccattgctgtctgctggggagggcggcccaggcccagggccagagctgcgagtacagcctcatggttggctaccagtgtggacaggtcttccgggcatgctgtgtcaagagccaggagaccggagatttggatgtcgggggcctccaagaaacggataagatcattgaggttgaggaggaacaagaggacccatatctgaatgaccgctgccgaggaggcgggccctgcaagcagcagtgccgagacacgggtgacgaggtggtctgctcctgcttcgtgggctaccagctgctgtctgatggtgtctcctgtgaagatgtcaatgaatgcatcacgggcagccacagctgccggcttggagaatcctgcatcaacacagtgggctctttccgctgccagcgggacagcagctgcgggactggctatgagctcacagaggacaatagctgcaaagatattgacgagtgtgagagtggtattcataactgcctccccgattttatctgtcagaatactctgggatccttccgctgccgacccaagctacagtgcaagagtggctttatacaagatgctctaggcaactgtattgatatcaatgagtgtttgagtatcagtgccccgtgccctatcgggcatacatgcatcaacacagagggctcctacacgtgccagaagaacgtgcccaactgtggccgtggctaccatctcaacgaggagggaacgcgctgtgttgatgtggacgagtgcgcgccacctgctgagccctgtgggaagggacatcgctgcgtgaactctcccggcagtttccgctgcgaatgcaagacgggttactattttgacggcatcagcaggatgtgtgtcgatgtcaacgagtgccagcgctaccccgggcgcctgtgtggccacaagtgcgagaacacgctgggctcctacctctgcagctgttccgtgggcttccggctctctgtggatggcaggtcatgtgaagacatcaatgagtgcagcagcagcccctgtagccaggagtgtgccaacgtctacggctcctaccagtgttactgccggcgaggctaccagctcagcgatgtggatggagtcacctgtgaagacatcgacgagtgcgccctgcccaccgggggccacatctgctcctaccgctgcatcaacatccctggaagcttccagtgcagctgcccctcgtctggctacaggctggcccccaatggccgcaactgccaagacattgatgagtgtgtgactggcatccacaactgctccatcaacgagacctgcttcaacatccagggcggcttccgctgcctggccttcgagtgccctgagaactaccgccgctccgcagccacgcagaaatccaagaagggaaggcagaacaccccagcgggatcaagtaaagaggactgcagggttcttccatggaagcaggggttggaggatacccaccttgatgcctagtgaggaagatggacctggacagacagtcagctccacaccttgcgctgagcagctgtgattgtgccacgggagcatgagcccttttccccacggcccttgccactgtctcctggccctctctctgatcatgccaggtttgcaccagcctcgagtctcccatgttgtagtacattctccaagatgcagcccaggagcctctctgaaggaccagtctggttacgatggtctgagcttccttagaaccttccatggttgtcttttcccagcagatgaagcatagcctccttggaatggcatgggaggcctggcctgatctggcctctgcccaccctttgagctgtacctgccccaccccagctcatccatgtgcttgtaccctggccccacggggaggcttgcccttccctgaatgtgccttcttgtggctttagcatgtgccatgctgtccccctgcagactgccattctccttgcagacttggctcagaagtcacctcctcagtgcagttagcctgagctcccctggccccaggtgcctccatcagagcatttaccccattgtgttgtggctgttccttaacgtccccactagccaggctctttgagggcagggattgtgtctggttaatttctgtattctctgcaactttgcaatgtttggcttgaagaaggagctcagtaaacatctgaataaacatgcaggttgatgg

SEQ ID NO: 10 - protein, 566 aa, Homo sapiens
MERAAPSRRVPLPLLLLGGLALLAAGVDADVLLEACCADGHRMATHQKDCSLPYATESKECRMVQEQCCHSQLEELHCATGISLANEQDRCATPHGDNASLEATFVKRCCHCCLLGRAAQAQGQSCEYSLMVGYQCGQVFRACCVKSQETGDLDVGGLQETDKIIEVEEEQEDPYLNDRCRGGGPCKQQCRDTGDEVVCSCFVGYQLLSDGVSCEDVNECITGSHSCRLGESCINTVGSFRCQRDSSCGTGYELTEDNSCKDIDECESGIHNCLPDFICQNTLGSFRCRPKLQCKSGFIQDALGNCIDINECLSISAPCPIGHTCINTEGSYTCQKNVPNCGRGYHLNEEGTRCVDVDECAPPAEPCGKGHRCVNSPGSFRCECKTGYYFDGISRMCVDVNECQRYPGRLCGHKCENTLGSYLCSCSVGFRLSVDGRSCEDINECSSSPCSQECANVYGSYQCYCRRGYQLSDVDGVTCEDIDECALPTGGHICSYRCINIPGSFQCSCPSSGYRLAPNGRNCQDIDECVTGIHNCSINETCFNIQGGFRCLAFECPENYRRSAAT

SEQ ID NO: 11 - DNA, 2353 bp, Homo sapiens
cctagcttggcgcggaatccgtgaattgcccgcggcccgagggtgcagctcccggactgactggctctgcccttccccatggacgcctcctctagcccgtggaatccaaccccggctcctgtcagcagccctcccctgctgctccccatccctgccatcgtcttcatcgctgtgggcatctatttgttgctgctgggtctagtcctgctgactaggaactgcctgctggcccagggctgctgcgcggacggtagctccccctgcaggaagcaaggttcctccgggcccccagactgctgctggacctgtgcagaagcctgcaactttcctctgcctagcccggcccacttcctggatgcttgctgcccccagcccaccagagctgactgggcacctcgctgcccccgctgctgcccactctgcgactgtgcctgtacgtgccagctccccgactgccagagcctcaactgtctctgcttcgagatcaagctccgatgaggacccagggcccctgccctctggggagcggccagcccccagggcccatgtgccctcctccctgaagagcctttccccacgccactggaaccacagatggcctgccgagcacccaggcctgggaactggaagtggcagcgcagggcctggctccctgcagggcaggactcttggccggctggacggcagctcctctggagggccagaaaagagaggggctagtgctcgggcaggtgccctggcttcccttcccctccacacgtcaacgattctatttgaagttgggcaggggggtggcgctgctcaccacacacaagtgttataggaggagtctggcccttgagtaccgggtacgcaggggtgcctcaaccacactccgtccacggactctccgttattttaggaggtccctggccaaagatttatttctcttgacaaccaagggcctccgtctggatttccaaggaagaatttcctctgaagcaccggaacttgctactaccagcaccatgccctaccaatatccagcactgaccccggagcagaagaaggagctgtctgacatcgctcaccgcatcgtggcacctggcaagggcatcctggctgcagatgagtccactgggagcattgccaagcggctgcagtccattggcaccgagaacaccgaggagaaccggcgcttctaccgccagctgctgctgacagctgacgaccgcgtgaacccctgcattgggggtgtcatcctcttccatgagacactctaccagaaggcggatgatgggcgtcccttcccccaagttatcaaatccaagggcggtgttgtgggcatcaaggtagacaagggcgtggtccccctggcagggacaaatggcgagactaccacccaagggttggatgggctgtctgagcgctgtgcccagtacaagaaggacggagctgacttcgccaagtggcgttgtgtgctgaagattggggaacacaccccctcagccctcgccatcatggaaaatgccaatgttctggcccgttatgccagtatctgccagcagaatggcattgtgcccatcgtggagcctgagatcctccctgatggggaccatgacttgaagcgctgccagtatgtgaccgagaaggtgctggctgctgtctacaaggctctgagtgaccaccacatctacctggaaggcaccttgctgaagcccaacatggtcaccccaggccatgcttgcactcagaagttttctcatgaggagattgccatggcgaccgtcacagcgctgcgccgcacagtgccccccgctgtcactgggatcaccttcctgtctggaggccagagtgaggaggaggcgtccatcaacctcaatgccattaacaagtgccccctgctgaagccctgggccctgaccttctcctacggccgagccctgcaggcctctgccctgaaggcctggggcgggaagaaggagaacctgaaggctgcgcaggaggagtatgtcaagcgagccctggccaacagccttgcctgtcaaggaaagtacactccgagcggtcaggctggggctgctgccagcgagtccctcttcgtctctaaccacgcctattaagcggaggtgttcccaggctgcccccaacactccaggccctgccccctcccactcttgaagaggaggccgcctcctcggggctccaggctggcttgcccgcgctctttcttccctcgtgacagtggtgtgtggtgtcgtctgtgaatgctaagtccatcaccctttccggcacactgccaaataaacagctatttaagggggaaaaaaaaaaaaaaaaaaaaaaaaaaaaaaaaaaaaaaaaaaaaaaaaaa

SEQ ID NO: 12 - protein, 364 aa, Homo sapiens
MPYQYPALTPEQKKELSDIAHRIVAPGKGILAADESTGSIAKRLQSIGTENTEENRRFYRQLLLTADDRVNPCIGGVILFHETLYQKADDGRPFPQVIKSKGGVVGIKVDKGVVPLAGTNGETTTQGLDGLSERCAQYKKDGADFAKWRCVLKIGEHTPSALAIMENANVLARYASICQQNGIVPIVEPEILPDGDHDLKRCQYVTEKVLAAVYKALSDHHIYLEGTLLKPNMVTPGHACTQKFSHEEIAMATVTALRRTVPPAVTGITFLSGGQSEEEASINLNAINKCPLLKPWALTFSYGRALQASALKAWGGKKENLKAAQEEYVKRALANSLACQGKYTPSGQAGAAASESLFVSNHAY

SEQ ID NO: 13 - DNA, 604 bp, Homo sapiens
  misc_feature (508)..(508): n is a, c, g, or t
  misc_feature (524)..(524): n is a, c, g, or t
  misc_feature (532)..(532): n is a, c, g, or t
  misc_feature (585)..(585): n is a, c, g, or t
tttcatgaagaccagtttattttacatgcttgctttcacattctttactgggaatttaaggccttttttcagccttaacttgtataccaacctcaaggattttgtttgatacagaaaaggatagggctgggcttctgccaaggactgataacctgcctgccaaaaggaagagggaatgaaagccttttgtccttctaggccccttacagtacctcaaaatctaaaggccttaaaggggaaaaaaaccgtatctgttctttctccttatctcctacccttctctttaagcatattgaagatggacttttttccaaatgtttatttgtaggaagaggtgatgagtgcaggccagcagctggagaactttacagctttgatgcaccaggaactgtattcaagctgagggcaaaagcctcctagggagggagccaggtccaccaaggccagagacagacaggcgagactgtggaaggccagggagatgctgcctggtaagtgctccgctggnctactgggcaagtccnccgggggntctagagctgataggaagaaggagtccattttgaagtcctgcctggagacttngacctagctgaactaaggt

SEQ ID NO: 14 - protein, 144 aa, Homo sapiens
MKWDLHGSLQHGHCSAVLSLLGSTSAMGCWVCWTTSMGLTPCSSRPRPTRDMSSCWASPRSLRASQTPQRGWSERQPKCHPGCPSAMGCRHGFLIAPNNLPPSATRPNDGTTRVEGRSASRKSRAKDEAFFKLLPLMSLNGIRS

SEQ ID NO: 15 - DNA, 2486 bp, Homo sapiens
gcactgcctctggcacctggggcagccgcgcccgcggagttttccgcccggcgctgacggctgctgcgcccgcggctccccagtgccccgagtgccccgcgggccccgcgagcgggagtgggacccagcccctaggcagaacccaggcgccgcgcccgggacgcccgcggagagagccactcccgcccacgtcccatttcgcccctcgcgtccggagtccccgtggccagatctaaccatgagctaccctggctatcccccgcccccaggtggctacccaccagctgcaccaggtggtggtccctggggaggtgctgcctaccctcctccgcccagcatgccccccatcgggctggataacgtggccacctatgcggggcagttcaaccaggactatctctcgggaatggcggccaacatgtctgggacatttggaggagccaacatgcccaacctgtaccctggggcccctggggctggctacccaccagtgccccctggcggctttgggcagcccccctctgcccagcagcctgttcctccctatgggatgtatccacccccaggaggaaacccaccctccaggatgccctcatatccgccatacccaggggcccctgtgccgggccagcccatgccaccccccggacagcagcccccaggggcctaccctgggcagccaccagtgacctaccctggtcagcctccagtgccactccctgggcagcagcagccagtgccgagctacccaggatacccggggtctgggactgtcacccccgctgtgcccccaacccagtttggaagccgaggcaccatcactgatgctcccggctttgaccccctgcgagatgccgaggtcctgcggaaggccatgaaaggcttcgggacggatgagcaggccatcattgactgcctggggagtcgctccaacaagcagcggcagcagatcctactttccttcaagacggcttacggcaaggatttgatcaaagatctgaaatctgaactgtcaggaaactttgagaagacaatcttggctctgatgaagaccccagtcctctttgacatttatgagataaaggaagccatcaagggggttggcactgatgaagcctgcctgattgagatcctcgcttcccgcagcaatgagcacatccgagaattaaacagagcctacaaagcagaattcaaaaagaccctggaagaggccattcgaagcgacacatcagggcacttccagcggctcctcatctctctctctcagggaaaccgtgatgaaagcacaaacgtggacatgtcactcgcccagagagatgcccaggagctgtatgcggccggggagaaccgcctgggaacagacgagtccaagttcaatgcggttctgtgctcccggagccgggcccacctggtagcagttttcaatgagtaccagagaatgacaggccgggacattgagaagagcatctgccgggagatgtccggggacctggaggagggcatgctggccgtggtgaaatgtctcaagaataccccagccttctttgcggagaggctcaacaaggccatgaggggggcaggaacaaaggaccggaccctgattcgcatcatggtgtctcgcagcgagaccgacctcctggacatcagatcagagtataagcggatgtacggcaagtcgctgtaccacgacatctcgggagatacttcaggggattaccggaagattctgctgaagatctgtggtggcaatgactgaacagtgactggtggctcacttctgcccacctgccggcaacaccagtgccaggaaaaggccaaaagaatgtctgtttctaacaaatccacaaatagccccgagattcaccgtcctagagcttaggcctgtcttccacccctcctgacccgtatagtgtgccacaggacctgggtcggtctagaactctctcaggatgccttttctaccccatccctcacagcctcttgctgctaaaatagatgtttcatttttctgactcatgcaatcattcccctttgcctgtggctaagacttggcttcatttcgtcatgtaattgtatatttttatttggaggcatattttcttttcttacagtcattgccagacagaggcatacaagtctgtttgctgcatacacatttctggtgagggcgactgggtgggtgaagcaccgtgtcctcgctgaggagagaaagggaggcgtgcctgagaaggtagcctgtgcatctggtgagtgtgtcacgagctttgttactgccaaactcactcctttttagaaaaaacaaaaaaaaagggccagaaagtcattccttccatcttccttgcagaaaccacgagaacaaagccagttccctgtcagtgacagggcttcttgtaatttgtggtatgtgccttaaacctgaatgtctgtagccaaaacttgtttccacattaagagtcagccagctctggaatggtctggaaatgtca

SEQ ID NO: 16 - protein, 505 aa, Homo sapiens
MSYPGYPPPPGGYPPAAPGGGPWGGAAYPPPPSMPPIGLDNVATYAGQFNQDYLSGMAANMSGTFGGANMPNLYPGAPGAGYPPVPPGGFGQPPSAQQPVPPYGMYPPPGGNPPSRMPSYPPYPGAPVPGQPMPPPGQQPPGAYPGQPPVTYPGQPPVPLPGQQQPVPSYPGYPGSGTVTPAVPPTQFGSRGTITDAPGFDPLRDAEVLRKAMKGFGTDEQAIIDCLGSRSNKQRQQILLSFKTAYGKDLIKDLKSELSGNFEKTILALMKTPVLFDIYEIKEAIKGVGTDEACLIEILASRSNEHIRELNRAYKAEFKKTLEEAIRSDTSGHFQRLLISLSQGNRDESTNVDMSLAQRDAQELYAAGENRLGTDESKFNAVLCSRSRAHLVAVFNEYQRMTGRDIEKSICREMSGDLEEGMLAVVKCLKNTPAFFAERLNKAMRGAGTKDRTLIRIMVSRSETDLLDIRSEYKRMYGKSLYHDISGDTSGDYRKILLKICGGND

SEQ ID NO: 17 - DNA, 1664 bp, Homo sapiens
aattcataaacaagagctccagttccctggaacctgagtcgggagacctgcagctcactttctccctgtttgctggccagcagggtttgtggccgcctctgctgtgacgccacagcctggtgaggagggggctgcagttcctcaggaaactgccagtggacaaagtcataaacaagagttccagttccctggaacctgagtcgggaggcctgcaactcactttctccctgtttgctggcccagacaggcctgtgctagagggctggatagtgtggtagtgtggtggatagagtgctgcctctatccacaacgcagccatatgctgactgaagataactttgtgtctggaagagccctctgatttcttacactaatggccttacacgacatggaggattttacatttgatggaacaaagcgcttaagtgtcaactacgtgaagggaattcttcaaccgacagacacctgtgacatctgggataagatctggaacttccaagccaagcctgatgacctgcttatttctacctatcctaaagcaggaacaacatggactcaggagatagtggaattaatacaaaatgaaggtgatgtggagaaaagtaaacgggcaccgactcatcaacgatttcctttcctcgaaatgaaaatcccatccttaggatctggtttggaacaagctcatgcaatgccctcaccacggatcctgaaaacacatcttccctttcacttgctgccaccatccttgctagagaaaaactgtaagataatctatgtagcaagaaatcccaaggacaacatggtgtcctattaccatttccaaagaatgaataaagctcttcctgctccaggaacatgggaagagtattttgagacttttctggctgggaaagtgtgctggggctcctggcatgaacatgtgaaaggatggtgggaagccaaagacaaacaccgtattctctatctcttctatgaggacatgaagaagaacccaaagcatgaaattcagaagctggcagaatttattgggaagaaattagatgacaaagttctagataaaattgtccattacacttcgtttgatgtcatgaaacagaatccaatggcaaactattcatcgattcctgctgaaatcatggaccactccatttctccattcatgagaaaaggggcagtgggagactggaagaaacacttcaccgtggctcagaatgagagatttgatgaagattacaagaagaaaatgactgataccagactaactttccacttccagttctagtaaggaagaaaaactgaaaatgttttagtttattacccagtatatttgggtaataatgaaagtttaattctcataacaaatgatatcagattccagttatcagaatagtttactgtgtttgctcttattcactctactaaaaaattattttaaaaggctggaggcaaggtggtgacaggcagcagggtggcgacatggagagagggaagctcaataaatcactaggtacaatcctggtatcattgccaattatcatcatatttacattttctacaatcatgtgcttattaacatattggaaatgcttcagtcctcacatgataatacactaacattttcagattaagttttggttcaagttaattttttttttttttttttt

SEQ ID NO: 18 - protein, 302 aa, Homo sapiens
MALHDMEDFTFDGTKRLSVNYVKGILQPTDTCDIWDKIWNFQAKPDDLLISTYPKAGTTWTQEIVELIQNEGDVEKSKRAPTHQRFPFLEMKIPSLGSGLEQAHAMPSPRILKTHLPFHLLPPSLLEKNCKIIYVARNPKDNMVSYYHFQRMNKALPAPGTWEEYFETFLAGKVCWGSWHEHVKGWWEAKDKHRILYLFYEDMKKNPKHEIQKLAEFIGKKLDDKVLDKIVHYTSFDVMKQNPMANYSSIPAEIMDHSISPFMRKGAVGDWKKHFTVAQNERFDEDYKKKMTDTRLTFHFQF

SEQ ID NO: 19 - DNA, 4110 bp, Homo sapiens
gcggaatagtgggttttgctgcaaccggtttattttccttctgttttcacccattctggcacaatctggcgccatcgtccttcttgtgaggccaagcctgaaaatgcgaagcagagaggcaggaccaaaattgaggcgaatccaggaacctgccaatgggtctccgggtgcggtctctgaaactggaggatatcgggaggaaaggctctccgatgcggagataatggggaagctcttggcatggttggctgtaggtatgtgataccggaggagcaggagtcaaataggatacgccgacttttaattcaaggaacccttttctgaaacactttgccacaatgaaggaaataagattacagccgaagatacatattaaggatgaagttaaaggaagtagatcgtacagccatgcaggcatggagccctgcccagaatcaccccatttacctagcaacaggaacatctgctcagcaattggatgcaacatttagtacgaatgcttcccttgagatatttgaattagacctctctgatccatccttggatatgaaatcttgtgccacattctcctcttctcacaggtaccacaagttgatttgggggccttataaaatggattccaaaggagatgtctctggagttctgattgcaggtggtgaaaatggaaatattattctctatgatccttctaaaattatagctggagacaaggaagttgtgattgcccagaatgacaagcatactggcccagtgagagccttggatgtgaacattttccagactaatctggtagcttctggtgctaatgaatctgaaatctacatatgggatctaaataattttgcaaccccaatgacaccaggagccaaaacacagccgccagaagatatcagctgcattgcatggaacagacaagttcagcatattttagcatcagccagtcccagtggccgggccactgtatgggatcttaggaaaaatgagccaatcatcaaagtcagtgaccatagtaacagaatgcattgttctgggttggcatggcatcctgatgttgctactcagatggtccttgcctccgaggatgaccggttaccagtgatccagatgtgggatcttcgatttgcttcctctccacttcgtgtcctggaaaaccatgccagggggattttggcaattgcttggagcatggcagatcctgaattgttactgagctgtggaaaagatgctaagattctctgctccaatccaaacacaggagaggtgttatatgaacttcccaccaacacacagtggtgcttcgatattcagtggtgtccccgaaatcctgctgtcttatcagctgcttcgtttgatgggcgtatcagtgtttattctatcatgggaggaagcacagatggtttaagacagaaacaagttgacaagctttcatcatcttttgggaatcttgatccctttggcacaggacagccccttcctccgttacaaattccacagcagactgctcagcatagtatagtgctgcctctgaagaagccgcccaagtggattcgaaggcctgttggtgcttctttttcatttggaggcaaactggttacgtttgagaatgtcagaatgccttctcatcagggagctgagcagcagcagcagcagcaccatgtgttcattagtcaggttgtaacagaaaaggagttcctcagccgatcagaccaacttcagcaggctgtgcagtcacaaggatttatcaattattgccaaaaaaaaattgatgcttctcagactgaatttgagaaaaatgtgtggtcctttttgaaggtaaactttgaggatgattctcgtggaaaataccttgaacttctaggatacagaaaagaagatctaggaaagaagattgctttggccttgaacaaagtggatggagccaatgtggctcttaaagactctgaccaagtagcacagagtgatggggaggagagccctgctgctgaagagcagctcttgggagagcacattaaagaggaaaaagaagaatctgaatttctaccctcatctggaggaacatttaatatctctgtcagtggggacattgatggtttaattactcaggctttgctgacgggcaattttgagagtgctgttgacctttgtttacatgataaccgcatggccgatgccattatattggccatagcaggtggacaagaactcttggctcgaacccagaaaaaatacttcgcaaaatcccaaagcaaaattaccaggctcatcactgcagtggtgatgaagaactggaaagagattgttgagtcttgtgatcttaaaaattggagagaggctttagctgcagtattgacttatgcaaagccggatgaattttcagccctttgtgatcttttgggaaccaggcttgaaaatgaaggagatagcctcctgcagactcaagcatgtctctgctatatttgtgcagggaatgtagagaaattagttgcatgttggactaaagctcaagatggaagccaccctttgtcacttcaggatctgattgagaaagttgtcatcctgcgaaaagctgtgcaactcactcaagccatggacactagtactgtaggagttctcttggctgcgaagatgagtcagtatgccaatttgttggcagctcagggcagtattgctgcagccttggcttttcttcctgacaacaccaaccagccaaatatcatgcagcttcgtgacagactttgtagagcacaaggagagcctgtagcaggacatgaatcacctaaaattccgtacgagaaacagcagctccccaagggcaggcctggaccagttgctggccaccaccagatgccaagagttcaaactcaacaatattatccccatggagaaaatcctccacctccgggtttcataatgcatggaaatgttaatccaaatgctgctggtcagcttcccacatctccaggtcatatgcacacccaggtaccaccttatccacagccacagccttatcaaccagcccagccgtatcccttcggaacaggggggtcagcaatgtatcgacctcagcagcctgttgctcctcctacttcaaacgcttaccctaacaccccttacatatcttctgcttcttcctatactgggcagtctcagctgtacgcagcacagcaccaggcctcttcacctacctccagccctgctacttctttccctcctcccccttcctctggagcatccttccagcatggcggaccaggagctccaccatcatcttcagcttatgcactgcctcctggaacaacaggtacactgcctgctgccagtgagctgcctgcgtcccaaagaacaggtcctcagaatggttggaatgaccctccagctttgaacagagtacccaaaaagaagaagatgcctgaaaacttcatgcctcctgttcccatcacatcaccaatcatgaacccgttgggtgacccccagtcacaaatgctgcagcaacagccttcagctccagtaccactgtcaagccagtcttcattcccacagccacatcttccaggtggccagcccttccatggcgtacagcaacctcttggtcaaacaggcatgccaccatctttttcaaagcccaatattgaaggtgccccaggggctcctattggaaataccttccagcatgtgcagtctttgccaacaaaaaaaattaccaagaaacctattccagatgagcacctcattctaaagaccacatttgaggatcttattcagcgctgcctttcttcagcaacagaccctcaaaccaagaggaagctagatgatgccagcaaacgtttggagtttctgtatgataaacttagggaacagacactttcaccaacaatcaccagtggtttacacaacattgcaaggagcattgaaactcgaaactactcagaaggattgaccatgcatacccacatagttagcaccagcaacttcagtgagacctctgctttcatgccagttctcaaagttgttctcacccaggccaataagctgggtgtctaaaaggacagcttctcttccactcaatattgccatttttccaaagaaacatgttaaaaaaaaaaaaaaaaa

SEQ ID NO: 20 - protein, 1220 aa, Homo sapiens
MKLKEVDRTAMQAWSPAQNHPIYLATGTSAQQLDATFSTNASLEIFELDLSDPSLDMKSCATFSSSHRYHKLIWGPYKMDSKGDVSGVLIAGGENGNIILYDPSKIIAGDKEVVIAQNDKHTGPVRALDVNIFQTNLVASGANESEIYIWDLNNFATPMTPGAKTQPPEDISCIAWNRQVQHILASASPSGRATVWDLRKNEPIIKVSDHSNRMHCSGLAWHPDVATQMVLASEDDRLPVIQMWDLRFASSPLRVLENHARGILAIAWSMADPELLLSCGKDAKILCSNPNTGEVLYELPTNTQWCFDIQWCPRNPAVLSAASFDGRISVYSIMGGSTDGLRQKQVDKLSSSFGNLDPFGTGQPLPPLQIPQQTAQHSIVLPLKKPPKWIRRPVGASFSFGGKLVTFENVRMPSHQGAEQQQQQHHVFISQVVTEKEFLSRSDQLQQAVQSQGFINYCQKKIDASQTEFEKNVWSFLKVNFEDDSRGKYLELLGYRKEDLGKKIALALNKVDGANVALKDSDQVAQSDGEESPAAEEQLLGEHIKEEKEESEFLPSSGGTFNISVSGDIDGLITQALLTGNFESAVDLCLHDNRMADAIILAIAGGQELLARTQKKYFAKSQSKITRLITAVVMKNWKEIVESCDLKNWREALAAVLTYAKPDEFSALCDLLGTRLENEGDSLLQTQACLCYICAGNVEKLVACWTKAQDGSHPLSLQDLIEKVVILRKAVQLTQAMDTSTVGVLLAAKMSQYANLLAAQGSIAAALAFLPDNTNQPNIMQLRDRLCRAQGEPVAGHESPKIPYEKQQLPKGRPGPVAGHHQMPRVQTQQYYPHGENPPPPGFIMHGNVNPNAAGQLPTSPGHMHTQVPPYPQPQPYQPAQPYPFGTGGSAMYRPQQPVAPPTSNAYPNTPYISSASSYTGQSQLYAAQHQASSPTSSPATSFPPPPSSGASFQHGGPGAPPSSSAYALPPGTTGTLPAASELPASQRTGPQNGWNDPPALNRVPKKKKMPENFMPPVPITSPIMNPLGDPQSQMLQQQPSAPVPLSSQSSFPQPHLPGGQPFHGVQQPLGQTGMPPSFSKPNIEGAPGAPIGNTFQHVQSLPTKKITKKPIPDEHLILKTTFEDLIQRCLSSATDPQTKRKLDDASKRLEFLYDKLREQTLSPTITSGLHNIARSIETRNYSEGLTMHTHIVSTSNFSETSAFMPVLKVVLTQANKLGV

SEQ ID NO: 21 - DNA, 7561 bp, Homo sapiens
gtgagctgaagcagggcagggcatcaactcacccaggaagtgcaaggggtttggggattttcctttcctagccaagggaaggcatgacagactgtacctggaaaaacaggacactcttgcccaaatactgcactttttgcacagtcttagcaactggcagaccaggagattctctcctgtgcctgattcattgggtcccacacccatagggccttgcttactgccagtgcagcagtctgagattaacaccccatccccgggagaactctaagaaggagctgatgtggaggagcagctgagacagttcaagatgacgaccacagtagccacagactatgacaacattgagatccagcagcagtacagtgatgtcaacaaccgctgggatgtcgacgactgggacaatgagaacagctctgcgcggctttttgagcggtcccgcatcaaggctctggcagatgagcgtgaagccgtgcagaagaagaccttcaccaagtgggtcaattcccaccttgcccgtgtgtcctgccggatcacagacctgtacactgaccttcgagatggacggatgctcatcaagctgctggaggtcctctctggagagaggctgcctaaacccaccaagggacgaatgcgcatccactgcttagagaatgtggacaaggcccttcagttcctgaaggagcagagagtccatcttgagaacatggggtcccatgacatcgtggatggaaaccaccggctgacccttggcctcatctggaccatcatcctgcgcttccagatccaggatatcagtgtggaaactgaagacaacaaagagaagaaatctgccaaggatgcattgctgttgtggtgccagatgaagacagctgggtaccccaatgtcaacattcacaatttcaccactagctggagggacggcatggccttcaatgcactgatacacaaacaccggcctgacctgatagattttgacaaactaaagaaatctaacgcacactacaacctgcagaatgcatttaatctggcagaacagcacctcggcctcactaaactgttggaccccgaagacatcagcgtggaccatcctgatgagaagtccataatcacttatgtggtgacttattaccactacttctctaagatgaaggccttagctgttgaaggaaaacgaattggaaaggtgcttgacaatgctattgaaacagaaaaaatgattgaaaagtatgaatcacttgcctctgaccttctggaatggattgaacaaaccatcatcattctgaacaatcgcaaatttgccaattcactggtcggggttcaacagcagcttcaggcattcaacacttaccgcactgtggagaaaccacccaaatttactgagaaggggaacttggaagtgctgctcttcaccattcagagcaagatgagggccaacaaccagaaggtctacatgccccgggaggggaagctcatctctgacatcaacaaggcctgggaaagactggaaaaagcggaacacgaaagagaactggctttgcggaatgagctcataagacaggagaaactggaacagctcgcccgcagatttgatcgcaaggcagctatgagggagacttggctgagcgaaaaccagcgtctggtgtctcaggacaactttgggtttgaccttcctgcagttgaggccgccacaaaaaagcacgaggccattgagacagacattgccgcatacgaggagcgtgtgcaggctgtggtagccgtggccagggagctcgaggccgagaattaccacgacatcaagcgcatcacagcgaggaaggacaatgtcatccggctctgggaatacctactggaactgctcagggcccggagacagcggctcgagatgaacctggggctgcagaagatattccaggaaatgctctacattatggactggatggatgaaatgaaggtgctagtattgtctcaagactatggcaaacacttacttggtgtggaagacctgttacagaagcacaccctggttgaagcagacattggcatccaggcagagcgggtgagaggtgtcaatgcctccgcccagaagttcgcaacagacggggaaggttacaagccctgtgacccccaggtgatccgagaccgcgtggcccacatggagttctgttatcaagagctttgccagctggcggctgagcgcagggcccgtctggaagagtcccgccgcctctggaagttcttctgggagatggcagaagaggaaggctggatacgggagaaggagaagatcctgtcctcggacgattacgggaaagacctgaccagcgtcatgcgcctgctcagcaagcaccgggcgttcgaggacgagatgagcggccgcagtggccactttgagcaggccatcaaggaaggcgaagacatgatcgcggaggagcacttcgggtcggagaagatccgtgagaggatcatttacatccgggagcagtgggccaacctagagcagctctcggccattcggaagaagcgcctggaggaggcctccctgctgcaccagttccaggcagatgctgatgacattgatgcctggatgctggacatcctcaagattgtctccagcagcgacgtgggccacgatgagtattccacacagtctctggtcaagaaacacaaggacgtggcggaagagatcgccaattacaggcccacccttgacacgctgcacgaacaagccagcgccctcccccaggagcatgccgagtctccagacgtgaggggcaggctgtcgggcatcgaggagcggtataaggaggtggcagagctgacgcggctgcggaagcaggcactccaggacactctggccctgtacaagatgttcagcgaggctgatgcctgtgagctctggatcgacgagaaggagcagtggctcaacaacatgcagatcccagagaagctggaggatctggaggtcatccagcacagatttgagagcctagaaccagaaatgaacaaccaggcttcccgggttgcagtggtgaaccagattgcacgccagctgatgcacagcggccacccaagtgagaaggaaatcaaagcccagcaggacaaactcaacacaaggtggagccagttcagagaactggttgacaggaagaaggatgccctcctgtctgccctgagcatccagaactaccacctcgagtgcaatgaaaccaaatcctggattcgggaaaagaccaaggtcatcgagtccacccaggacctgggcaatgacctggctggcgtcatggccctgcagcgcaagctgaccggcatggagcgggacttggtggccattgaggcaaagctgagtgacctgcagaaggaggcggagaagctggagtccgagcaccccgaccaggcccaggccatcctgtctcggctggccgagatcagcgacgtgtgggaggagatgaagaccaccctgaaaaaccgagaggcctccctgggagaggccagcaagctgcagcagttcctacgggacttggacgacttccagtcctggctctctaggacccagacagcgatcgcctcggaggacatgccaaacaccctgaccgaggctgagaagctgctcacgcagcacgagaacatcaagaatgagatcgacaactacgaggaggactaccagaagatgagggacatgggcgagatggtcacccaggggcagaccgatgcccagtacatgtttctgcggcagcggctgcaggccctggacactggatggaacgagctccacaagatgtgggagaacagacaaaatctcctatcccagtcacatgcctaccagcagttcctcagagacacgaagcaagccgaagcctttcttaacaaccaggagtatgttctggctcacactgaaatgcctaccaccttggaaggagctgaagcagcaattaaaaagcaagaggacttcatgaccaccatggacgccaatgaggagaagatcaatgctgtggtggagactggccggaggctggtgagcgatgggaacatcaactcagatcgcatccaggagaaggtggactctattgatgacagacataggaagaatcgtgagacagccagtgaacttttgatgaggttgaaggacaacagggatctacagaaattcctgcaagattgtcaagagctgtctctctggatcaatgagaagatgctcacagcccaggacatgtcttacgatgaagccagaaatctgcacagtaaatggttgaagcatcaagcatttatggcagaacttgcatccaacaaagaatggcttgacaaaatcgagaaggaaggaatgcagctcatttcagaaaagcctgagacggaagctgtggtgaaggagaaactcactggtttacataaaatgtgggaagtccttgaatccactacccagacaaaggcccagcggctctttgatgcaaacaaggccgaacttttcacccagagctgtgcagatctagacaaatggctgcacggcctggagagtcagattcagtctgatgactatggcaaacacctgaccagtgtcaatatcctgctgaaaaagcaacagatgctggagaatcagatggaagtgcggaagaaggagatcgaagagctccaaagccaagcccaggccctgagtcaggaagggaagagcaccgacgaggtagacagcaagcgcctcaccgtgcagaccaagttcatggagttgctggagcccttgaacgagaggaagcataacctgctggcctccaaagagatccatcagttcaacagggatgtggaggacgagatcttgtgggttggagagaggatgcctttggcaacttccacggatcatggccacaacctccagactgtgcagctgttaataaagaaaaatcagaccctccagaaagaaatccaggggcaccagcctcgcattgacgacatctttgagaggagccaaaacatcgtcactgacagcagcagcctcagcgctgaggccatcagacagaggcttgccgacctgaagcagctgtggggtctcctcattgaggagacagagaaacgccacaggcggctggaggaggcgcacagggcccagcagtactactttgacgctgctgaggccgaagcctggatgagcgagcaggagctgtacatgatgtcagaggagaaggccaaggatgagcagagtgctgtctccatgttgaagaagcaccagatcttagaacaagctgtggaggactatgcagagaccgtgcatcagctctccaagaccagccgggccctggtggccgacagccatcctgaaagtgagcgcattagcatgcggcagtccaaagtggataaactgtacgctggtctgaaagaccttgctgaagagagaagaggcaagctggatgagagacacaggttattccagctcaaccgggaggtggacgacctggagcagtggatcgctgagagggaggtggtcgcagggtcccatgaactgggacaggactatgagcatgtcacgatgttacaagaacgattccgggagtttgcccgagacaccgggaacattgggcaggagcgcgtggacacggtcaatcacctggcagatgagctcatcaactctggacattcagatgccgccaccatcgctgaatggaaggatggcctcaatgaagcctgggccgacctcctggagctcattgacacaagaacacagattcttgccgcttcctatgaactgcacaagttttaccacgatgccaaggagatctttgggcgtatacaggacaaacacaagaaactccctgaggagcttgggagagatcagaacacagtggagaccttacagagaatgcacactacatttgagcatgacatccaggctctgggcacacaggtgaggcagctgcaggaggatgcagcccgcctccaggcggcctatgcgggtgacaaggccgacgatatccagaagcgcgagaacgaggtcctggaagcctggaagtccctcctggacgcctgtgagagccgcagggtgcggctggtggacacaggggacaagttccgcttcttcagcatggtgcgcgacctcatgctctggatggaggatgtcatccggcagatcgaggcccaggagaagccaagggatgtatcatctgttgaactcttaatgaataatcatcaaggcatcaaagctgaaattgatgcacgtaatgacagtttcacaacctgcattgaacttgggaaatccctgttggcgagaaaacactatgcatctgaggagatcaaggaaaaattactgcagttgacggaaaagaggaaagaaatgatcgacaagtgggaagaccgatgggaatggttaagactgattctggaggtccatcagttctcaagagacgccagtgtggccgaggcctggctgcttggacaggagccgtacctatccagccgagagataggccagagcgtggacgaggtggagaagctcatcaagcgccacgaggcatttgaaaagtctgcagcaacctgggatgagaggttctctgccctggaaaggctgactacattggagttactggaagtgcgcagacagcaagaggaagaggagaggaagaggcggccgccttctcccgagccgagcacgaaggtttcagaggaagccgagtcccagcagcagtgggatacttcaaaaggagaacaagtttcccaaaacggtttgccagctgaacagggatctccacggatggcagaaacggtggacacaagcgaaatggtcaacggcgctacagaacaaaggacgagctctaaagagtccagccccatcccctccccgacctctgatcgtaaagccaagactgccctcccagcccagagtgccgccaccttaccagccagaacccaggagacaccttcggcccagatggaaggcttcctcaatcggaaacacgagtgggaggcccacaataagaaagcctcaagcaggtcctggcacaatgtttattgtgtcataaataaccaagaaatgggtttctacaaagatgcaaagactgctgcttctggaattccctaccacagcgaggtccctgtgagtttgaaagaagctgtctgcgaagtggcccttgattacaaaaagaagaaacacgtattcaagctaagactaaatgatggcaatgagtacctcttccaagccaaagacgatgaggaaatgaacacatggatccaggctatctcttccgccatctcctctgataaacacgaggtgtctgccagcacccagagcacgccagcatccagccgcgcgcagaccctccccaccagcgtcgtcaccatcaccagcgagtccagtcccggcaagcgggaaaaggacaaagagaaagacaaagagaagcggttcagcctttttggcaaaaagaaatgaactcctttccttcacctcctgcccttctcttaccttttcagtgaaattccagcatgcaagctcagaaccaacacattactctctgtgcctaatgttcctcaatgtggttgatttatttttttttttaatttatagagcatttcggggggggtgggg

SEQ ID NO: 22 - protein, 2364 aa, Homo sapiens
MTTTVATDYDNIEIQQQYSDVNNRWDVDDWDNENSSARLFERSRIKALADEREAVQKKTFTKWVNSHLARVSCRITDLYTDLRDGRMLIKLLEVLSGERLPKPTKGRMRIHCLENVDKALQFLKEQRVHLENMGSHDIVDGNHRLTLGLIWTIILRFQIQDISVETEDNKEKKSAKDALLLWCQMKTAGYPNVNIHNFTTSWRDGMAFNALIHKHRPDLIDFDKLKKSNAHYNLQNAFNLAEQHLGLTKLLDPEDISVDHPDEKSIITYVVTYYHYFSKMKALAVEGKRIGKVLDNAIETEKMIEKYESLASDLLEWIEQTIIILNNRKFANSLVGVQQQLQAFNTYRTVEKPPKFTEKGNLEVLLFTIQSKMRANNQKVYMPREGKLISDINKAWERLEKAEHERELALRNELIRQEKLEQLARRFDRKAAMRETWLSENQRLVSQDNFGFDLPAVEAATKKHEAIETDIAAYEERVQAVVAVARELEAENYHDIKRITARKDNVIRLWEYLLELLRARRQRLEMNLGLQKIFQEMLYIMDWMDEMKVLVLSQDYGKHLLGVEDLLQKHTLVEADIGIQAERVRGVNASAQKFATDGEGYKPCDPQVIRDRVAHMEFCYQELCQLAAERRARLEESRRLWKFFWEMAEEEGWIREKEKILSSDDYGKDLTSVMRLLSKHRAFEDEMSGRSGHFEQAIKEGEDMIAEEHFGSEKIRERIIYIREQWANLEQLSAIRKKRLEEASLLHQFQADADDIDAWMLDILKIVSSSDVGHDEYSTQSLVKKHKDVAEEIANYRPTLDTLHEQASALPQEHAESPDVRGRLSGIEERYKEVAELTRLRKQALQDTLALYKMFSEADACELWIDEKEQWLNNMQIPEKLEDLEVIQHRFESLEPEMNNQASRVAVVNQIARQLMHSGHPSEKEIKAQQDKLNTRWSQFRELVDRKKDALLSALSIQNYHLECNETKSWIREKTKVIESTQDLGNDLAGVMALQRKLTGMERDLVAIEAKLSDLQKEAEKLESEHPDQAQAILSRLAEISDVWEEMKTTLKNREASLGEASKLQQFLRDLDDFQSWLSRTQTAIASEDMPNTLTEAEKLLTQHENIKNEIDNYEEDYQKMRDMGEMVTQGQTDAQYMFLRQRLQALDTGWNELHKMWENRQNLLSQSHAYQQFLRDTKQAEAFLNNQEYVLAHTEMPTTLEGAEAAIKKQEDFMTTMDANEEKINAVVETGRRLVSDGNINSDRIQEKVDSIDDRHRKNRETASELLMRLKDNRDLQKFLQDCQELSLWINEKMLTAQDMSYDEARNLHSKWLKHQAFMAELASNKEWLDKIEKEGMQLISEKPETEAVVKEKLTGLHKMWEVLESTTQTKAQRLFDANKAELFTQSCADLDKWLHGLESQIQSDDYGKHLTSVNILLKKQQMLENQMEVRKKEIEELQSQAQALSQEGKSTDEVDSKRLTVQTKFMELLEPLNERKHNLLASKEIHQFNRDVEDEILWVGERMPLATSTDHGHNLQTVQLLIKKNQTLQKEIQGHQPRIDDIFERSQNIVTDSSSLSAEAIRQRLADLKQLWGLLIEETEKRHRRLEEAHRAQQYYFDAAEAEAWMSEQELYMMSEEKAKDEQSAVSMLKKHQILEQAVEDYAETVHQLSKTSRALVADSHPESERISMRQSKVDKLYAGLKDLAEERRGKLDERHRLFQLNREVDDLEQWIAEREVVAGSHELGQDYEHVTMLQERFREFARDTGNIGQERVDTVNHLADELINSGHSDAATIAEWKDGLNEAWADLLELIDTRTQILAASYELHKFYHDAKEIFGRIQDKHKKLPEELGRDQNTVETLQRMHTTFEHDIQALGTQVRQLQEDAARLQAAYAGDKADDIQKRENEVLEAWKSLLDACESRRVRLVDTGDKFRFFSMVRDLMLWMEDVIRQIEAQEKPRDVSSVELLMNNHQGIKAEIDARNDSFTTCIELGKSLLARKHYASEEIKEKLLQLTEKRKEMIDKWEDRWEWLRLILEVHQFSRDASVAEAWLLGQEPYLSSREIGQSVDEVEKLIKRHEAFEKSAATWDERFSALERLTTLELLEVRRQQEEEERKRRPPSPEPSTKVSEEAESQQQWDTSKGEQVSQNGLPAEQGSPRMAETVDTSEMVNGATEQRTSSKESSPIPSPTSDRKAKTALPAQSAATLPARTQETPSAQMEGFLNRKHEWEAHNKKASSRSWHNVYCVINNQEMGFYKDAKTAASGIPYHSEVPVSLKEAVCEVALDYKKKKHVFKLRLNDGNEYLFQAKDDEEMNTWIQAISSAISSDKHEVSASTQSTPASSRAQTLPTSVVTITSESSPGKREKDKEKDKEKRFSLFGKKK

SEQ ID NO: 23 - DNA, 1075 bp, Homo sapiens
tgatcagccgggggaactctgtgaccatccggtgtcaggggaccctggaggcccaggaataccgtctggttaaagagggaagcccagaaccctgggacacacagaacccactggagcccaagaacaaggccggattctccatcccatccatgacagagcaccatgcagggagataccgctgttactactacagccctgcaggctggtcagagcccagcgaccccctggagctggtggtgacaggattctacaacaaacccaccctctcagccctgcccagtcctgtggtgacctcaggagagaacgtgaccctccagtgtggctcacggctgagattcgacaggttcattctgactgaggaaggagaccacaagctctcctggaccttggactcacagctgacccccagtgggcagttccaggccctgttccctgtgggccctgtgacccccagccacaggtggatgctcagatgctatggctctcgcaggcgtatcctgcaggtatggtcagaacccagtgacctcctggagattccggtctcaggagcagctgataacctcagtccgtcacaaaacaagtctgactctgggactgcctcacaccttcaggattacgcagtagagaatctcatccgcatgggcatggccggcttgatcctggtggtccttgggattctgatatttcaggattggcacagccagagaagcccccaagctgcagctggaaggtgaacagaagagagaacaatgcaccattgaatgctggagccttggaagcgaatctgatggtcctaggaggttcgggaagaccatctgaggcctatgccatctggactgtctgctggcaatttctttttttctttcttttcttttctttcttttttttttttttttttttttgagatggagtcttgctctgtcaccaggctggaatgcagtggcgcaatctgggctcactgcaacctccgcctctcgggttcaagtgattctcctgcctcagcctctggcaatttctagagggaggaatgggtgtttgagtgcagagacactggtctggggtgatccatggagga

SEQ ID NO: 24 - protein, 243 aa, Homo sapiens
ISRGNSVTIRCQGTLEAQEYRLVKEGSPEPWDTQNPLEPKNKAGFSIPSMTEHHAGRYRCYYYSPAGWSEPSDPLELVVTGFYNKPTLSALPSPVVTSGENVTLQCGSRLRFDRFILTEEGDHKLSWTLDSQLTPSGQFQALFPVGPVTPSHRWMLRCYGSRRRILQVWSEPSDLLEIPVSGAADNLSPSQNKSDSGTASHLQDYAVENLIRMGMAGLILVVLGILIFQDWHSQRSPQAAAGR

SEQ ID NO: 25 - DNA, 992 bp, Homo sapiens
gatggcccctccgggaaactgtggcgtgatggccgcggggctctccagaacatcatccctgcctctactggcgctgccaaggctgtgggcaaggtcatccctgagctgaacgggaagctcactggcatggccttccgtgtccccactgccaacgtgtcagtggtggacctgacctgccgtctagaaaaacctgccaaatatgatgacatcaagaaggtggtgaagcaggcgtcggagggccccctcaagggcatcctgggctacactgagcaccaggtggtctcctctgacttcaacagcgacacccactcctccacctttgacgctggggctggcattgccctcaacgaccactttgtcaagctcatttcctggtatgacaacgaatttggctacagcaacagggtggtggacctcatggcccacatggcctccaaggagtaagacccctggaccaccagccccagcaagagcacaagaggaagagagagaccctcactgctggggagtccctgccacactcagtcccccaccacactgaatctcccctcctcacagttgccatgtagaccccttgaagaggggagggggctaggagccgcacttgtcatgtaccatcaataaagtaccctgtgctcaaccaaaaaaaaaaaaaaaaactcggagggccttatttcggtcgggcgaaagaggttgaattggacatggcttaggtgttccgtgcgccccggttttttgtcacggtggaagttccgggccccaaggggggattaattcgaacgcgtctgatattttagacgagagcggcgagtatacccccaaaacggcgttttgtcgacagacgtgctctcgtacgactcgtcgcaaacaccccacacggtggccgccacaacacaatcgagagaacagccgcagaaacgctatattgggcgcgagaacacacacacacactgcacgcaggccagaccagcggccgatagacgaataactgg

SEQ ID NO: 26 - protein, 335 aa, Homo sapiens
MGKVKVGVNGFGRIGRLVTRAAFNSGKVDIVAINDPFIDLNYMVYMFQYDSTHGKFHGTVKAENGKLVINGNPITIFQERDPSKIKWGDAGAEYVVESTGVFTTMEKAGAHLQGGAKRVIISAPSADAPMFVMGVNHEKYDNSLKIISNASCTTNCLAPLAKVIHDNFGIVEGLMTTVHAITATQKTVDGPSGKLWRDGRGALQNIIPASTGAAKAVGKVIPELNGKLTGMAFRVPTANVSVVDLTCRLEKPAKYDDIKKVVKQASEGPLKGILGYTEHQVVSSDFNSDTHSSTFDAGAGIALNDHFVKLISWYDNEFGYSNRVVDLMAHMASKE

SEQ ID NO: 27 - DNA, 508 bp, Homo sapiens
  misc_feature (106)..(106): n is a, c, g, or t
  misc_feature (220)..(220): n is a, c, g, or t
  misc_feature (434)..(434): n is a, c, g, or t
ctcggctttactgcagcctccgcttcctgggttcaagcgattctcctgcctcagcctcccgagtagctgggactacaggcgcgtgtgccacgccggctaatttttngtatttttagtagagatggagtttcaccatgttacccaggatggtctcaatatcctgagttcatgatccacccaccttggcctcccaaagtgctgggattacaggcgtgacacncacacccagccagttttcctattttctgaattcagaattgacttctctgggaaaactggagatgagaatctgcccagtgctctgctgtccagtcaccgccttttgaattttagttttgggcaccagggagtaccgttagctttccccttctttctggcccatttgactcatcagcacaataggggtcaacacctttaactttttaatttctaantttgttttattgtctttaggggtgtgtatggaaataaaacattgaacagggtttcttggaggccctcaaggtgt

SEQ ID NO: 28 - protein, 265 aa, Homo sapiens
MPMRHRKKAADKNLPCRPLVCAVLDLMVEFIVTHMMKEFPMDLYIRCIQVVHKLLCYQKKCRVRLHYTWRELWSALINLLKFLMSNETVLLAKHNIFTLALMIVNLFNMFITYGDTFLPTPSSYDELYYEIIRMHQSFDNLYSMVLRLSTNAGQWKEAASKVTHALVNIRAIINHFNPKIESYAAVNHISQLSEEQVLEVVRANYDTLTLKLQDGLDQYERYSEQHKEAAFFKELVRSISTNVRRNLVFHTLSQEVLLKEFSTIS

SEQ ID NO: 29 - DNA, 2682 bp, Homo sapiens
gggtagacccacgagtccgcccacgggtctgcatggctgcaggaggtcccggcgcggggtctgcggccccggtctcctccacatcctcccttcccctggctgctctcaacatgcgagtgcggcgccgcctgtctctgttcttgaacgtgcggacacaggtggcggccgactggaccgcgctggcggaggagatggactttgagtacttggagatccggcaactggagacacaagcggaccccactggcaggctgctggacgcctggcagggacgccctggcgcctctgtaggccgactgctcgagctgcttaccaagctgggctgcgacgacgtgctgctggagctgggacccagcattgaggaggattgccaaaagtatatcttgaagcagcagcaggaggaggctgagaagcctttacaggtggccgctgtagacagcagtgtcccacggacagcagagctggcgggcatcaccacacttgatgaccccctggggcatatgcctgagcgtttcgatgccttcatctgctattgccccagcgacatccagtttgtgcaggagatgatccggcaactggaacagacaaactatcgactgaagttgtgtgtgtctgaccgcgatgtcctgcctggcacctgtgtctggtctattgctagtgagctcatcgaaaagaggtgccgccggatggtggtggttgtctctgatgattacctgcagagcaaggaatgtgacttccagaccaaatttgcactcagcctctctccaggtgcccatcagaagcgactgatccccatcaagtacaaggcaatgaagaaagagttccccagcatcctgaggttcatcactgtctgcgactacaccaacccctgcaccaaatcttggttctggactcgccttgccaaggccttgtccctgccctgaagactgttctgaggccctgggtgtgtgtgtatctgtctgcctgtccatgtacttctgccctgcctcctcctttcgttgtaggaggaatctgtgctctacttacctctcaattcctggagatgccaacttcacagacacgtctgcagcagctggacatcacatttcatgtcctgcatggaaccagtggctgtgagtggcatgtccacttgctggattatcagccaggacactatagaacaggaccagctgagactaagaaggaccagcagagccagctcagctctgagccattcacacatcttcaccctcagtttcctcacttgaggagtgggatggggagaacagagagtagctgtgtttgaatccctgtaggaaatggtgaagcatagctctgggtctcctgggggagaccaggcttggctgcgggagagctggctgttgctggactacatgctggccactgctgtgaccacgacactgctggggcagcttcttccacagtgatgcctactgatgcttcagtgcctctgcacaccgcccattccacttcctccttccccacagggcaggtggggaagcagtttggcccagcccaaggagaccccaccttgagccttatttcctaatgggtccacctctcatctgcatctttcacacctcccagcttctgcccaaccttcagcagtgacaagtccccaagagactcgcctgagcagcttgggctgcttttcatttccacctgtcaggatgcctgtggtcatgctctcagctccacctggcatgagaagggatcctggcctctggcatattcatcaagtatgagttctggggatgagtcactgtaatgatgtgagcagggagccttcctccctgggccacctgcagagagctttcccaccaactttgtaccttgattgccttacaaagttatttgtttacaaacagcgaccatataaaagcctcctgccccaaagcttgtgggcacatgggcacatacagactcacatacagacacacacatatatgtacagacatgtactctcacacacacaggcaccagcatacacacgtttttctaggtacagctcccaggaacagctaggtgggaaagtcccatcactgagggagcctaaccatgtccctgaacaaaaattgggcactcatctattccttttctcttgtgtccctactcattgaaaccaaactctggaaaggacccaatgtaccagtatttatacctctaatgaagcacagagagaggaagagagctgcttaaactcacacaacaatgaactgcagacacagctgttctctccctctctccttcccagagcaatttatactttaccctcaggctgtcctctggggagaaggtgccatggtcttaggtgtctgtgccccaggacagaccctaggaccctaaatccaatagaaaatgcatatctttgctccactttcagccaggctggagcaaggtaccttttcttaggatcttgggagggaatggatgcccctctctgcatgatcttgttgaggcatttagctgccatgcacctgtccccctttaatactgggcattttaaagccatctcaagaggcatcttctacatgttttgtacgcattaaaataatttcaaagatatctgagaaaagccgatatttgccattcttcctatatcctggaatatatcttgcatcctgagtttataataataaataatattctaccttggaaaaaaaaaaaaaaaaaaaaaaaaaa

SEQ ID NO: 30 - protein, 296 aa, Homo sapiens [sequence omitted]

SEQ ID NO: 31 - DNA, 4608 bp, Homo sapiens
gacagaagtgaatgggaatggagaggccggcggcccgggagccgcatgggcccgacgcgctgcggcgcttccagggactgctgctggaccgccgaggccggctgcaccgccaggtgctgcgcctgcgcgaggtggcccggcgcctggagcgcctgcgcaggcgctccctcgtagccaacgtggccggcagctcgctgagcgcaacgggcgccctcgccgccatcgtggggctctcgctcagcccggtcaccctggggacctcgctgctggtgtcggccgtggggctgggggtggccacagccggaggggccgtcaccatcacgtccgatctctcgctgatcttctgcaactcccgggagctgcggagggtgcaggagatcgcggccacctgccaggaccagatgcgagagatcctgagctgcctcgagtttttctgccgctggcagggctgcggggaccgccagctgctgcagtgcgggaggaacgcctccatcgccctgtacaattctgtctacttcatcgtcttctttggctcacgtggcttcctcatccccaggcgggcggagggggacaccaaggttagccaggccgtgctgaaggccaagattcagaaactggccgagagcctggagtcctgcaccggggctctggacgaactcagcgagcagctggagtctcgggttcagctctgcaccaagtccagtcgtggccacgacctcaagatctctgctgaccagcgtgcagggctgtttttctgagaacatcctttccccctaatgaccgaggccagcaaatcatcctcatgggatgctccagaatttgtagctcccttaggaaaacaccaagctgggttaggagccgaaggcaaaggatgagaaaaactgtttttgaagtgggcaggtccccaaagcccttcttttcccatcactgtgacatctgcctgggcttgagtgctacggacttttcagtcttcctagtggaaaaatgtgacccaaaaactccttttcctttatcaaaaactttctgtctaaacacagctgggcaggcactcctgttttaaagttatttcggggtccctgaccctgccctggtggcttggcctgagactggagagagtgccatcctctgggtcctctccaagtcctactagtctttgaagtcctcaaaatgtgcgtgaggaaggcatttgcctctattccagaatttctgatacaaagaactccagaatccagagcaaatcagcccttctctgaacgttgtaggatggttcagaacccagagaggaccctggtgctgatatctcctcctcttccctttcccctcagcttacttactcccagatgcggcctgggtatgaagtaggcctttcctgagtggctcccaatccagtcctccaagtactcagaggggaagcccgtgaagccgtcatctaagtcctgctccctcacatgaagctgagggccagatagatggagcgactgccaacttcatttcccgacatcattgtgttcagaagagagtgatgggttttgagttagacagtcctgggcttgagacaggctttgtcactactgtgtgagtgtagccacctaatctctctgagactgtgtaaaacaaagatgataaaatctcaccctgttgtgagatattaaatgagccaaagtgcctagcatgatggtgctggctcatatagtgtagtccctggaatggcaaattaacatcacccaggaacttgttagaaaggcaaattcttggacacaaccctcctgatttatggaatcagaaactctggctgtggggcccagcaacctgagtttaaacaatttctctgggtggttctgcggcacactaaggtttgaaaatcactacaacaaatgctaacttctaatccccttgatgagctttcacgaagtctcacggcttctctagggactccatggtcttcagagtcgttcacagatgaccaaggacagactgtgtcccagaagccaaaatgagagagagagagagagcacgcgtacgtgcaccctggggcagtgtctcaccgtatgaataagggatgtaacactaaaagcccattagggggcagtgtttcccgcctgttgtagaaactggtacagaaaggatcctatatgaagttcctgaaactgacctttgtctattattaccttctctgaaaagtgccagtccatgtattttttatttattttaagtttgtaatttaatttttaattattgtttagtgtttgcatttaattttatttaatcaccacatttagaaaataataagagcaagtttctaaatgggagactgctgaggctctttgcaagagatgagattaagtttgagtttctaaggcagggcatgagctggaaatagcattgctttccttgattgtctctctccttcagggagattctttttctctagtgttttaagtgatcctttgaagtaagtgtggagagtcttgaatggcaagaccaggagctgagtttaagcttgtaatggaagcttgcattgtgggatatataactgaggaagcatatttatcctgaaggtattttgccagaaggtatcacttgacctggaaaaggaatctatttagttcaggaaagataaaaagtttagaggtatgtgaaggaagcacttagaacttgcaagcctgatgtcctatcaagttatgtcttctgggtgacagacaaaatagcttgtcttatggtggtgatgtgttgcattttcactttggggtctgtaagaaactgtcagtgaaaatatgtacaattccttcaatttccattcttaacaactgtaatgttgaaaaataagttgaaaagtctttgggaccatacatgcaaaaacggtgcctctgttacttaattatttaatattctataaatgtacccaatctgtccgcacccttcccagtgatggggcagtatgtctgaggaagtataatttcagtactggggtcggggagaggaggtgatgtttctacatttttattttttctataaattgcaattggtctgtatgctggtttattttgaaatttatattggtttcttttcaagctggtgtcatctcctagactgtttcacccagatgctagcattttttttttttttgagacagagtctcactctgtcacctaggctggagttgcagtggtttgatctcggctcactgcaacctccgactcctgggttcaagcaattcttctgcctcagcctcctgagtagctgggattacagatgtgcaccagcacacccggctaattttttgtatttttagtagagacagggtttcgccatgttggccaggctggtcttgaactcctggccttatgtgatccgcccaccttggcttcccaaagtgctgggattacaggcatgagccacctcgcctggccagatgctagcattttagatcaaacaattcattttagatgaattgttttgtttcacaatcattttaaatcattttagaatgtacttcacattattagttgtgttatggcataaaggtacaaccattccctaactccatcttttattaatgcttaagtttaaattatattcttccaatgcctaagctattccctagaattaaactgggcacttttggaagcagcaacagtaacagcagcagcaaacttttcctctcatattttgggtgtatcaaaagttctagacttttgaagttatgatttcagtggcccactttatttctaaggaagagtgtctactttggaacgatactttgcacatagtaggaactcaagaaatacatttgaataattataattaactgtttagctatcttaatgagaatttgttgacaacaaaagatcatccatcgccttatgtgtgagtaagattggagcctctatcaagatttagtcaagttcagttagattgattctagaaacaaatatttatttctttcttttacggggatgtgaataaggcttttccttaaggccttcattctttaaacaaacaggttgaaatggtatgttgtaaaagagaagacgggagagaggtatttagatgataagtgtacttcacaaaaatgccaaagtttgaaaaataggtatgtttgttctaaatgtttaagtgcttctctgttaggttctggggcttgcaatcatttgaattgttctgtttcacaataaaggagattcactgggttctgcattttcaggattcaatagaactgctccattaaaaaaataatccttagcaagcattcgaatcctaactgctttgatgcacttgccctcgggcacctgtcatttccaatatggtaggtgtcaaagtcaaaagtatttactgggagaaaaaagagaggagtggttgtagaagtctccctaaatcagacatgtcaagcaatcagccaacgtggtgtatttctcattcaatattttagtgtgaattgagacactgagataaagacatcgtgcagagataaatggggatacagttaaatgtagcaactcttgagttcattttttcccactgtagcaaaattaatgctttctctttattgaaataaattgctcattcctccaaaaaaaaaaaaaaaaaaaaaaaaaaaaaaaaaaaagg

SEQ ID NO: 32 - protein, 248 aa, Homo sapiens
MGMERPAAREPHGPDALRRFQGLLLDRRGRLHRQVLRLREVARRLERLRRRSLVANVAGSSLSATGALAAIVGLSLSPVTLGTSLLVSAVGLGVATAGGAVTITSDLSLIFCNSRELRRVQEIAATCQDQMREILSCLEFFCRWQGCGDRQLLQCGRNASIALYNSVYFIVFFGSRGFLIPRRAEGDTKVSQAVLKAKIQKLAESLESCTGALDELSEQLESRVQLCTKSSRGHDLKISADQRAGLFF

SEQ ID NO: 33 - DNA, 2042 bp, Homo sapiens
caaccatatatccaagcctttgccgaatacatcctatctgccacacatccagcgtgaggtccctccagctacaaggtgggcaccatggcggagaagtttgactgccactactgcagggatcccttgcaggggaagaagtatgtgcaaaaggatggccaccactgctgcctgaaatgctttgacaagttctgtgccaacacctgtgtggaatgccgcaagcccatcggtgcggactccaaggaggtgcactataagaaccgcttctggcatgacacctgcttccgctgtgccaagtgccttcaccccttggccaatgagacctttgtggccaaggacaacaagatcctgtgcaacaagtgcaccactcgggaggactcccccaagtgcaaggggtgcttcaaggccattgtggcaggagatcaaaacgtggagtacaaggggaccgtctggcacaaagactgcttcacctgtagtaactgcaagcaagtcatcgggactggaagcttcttccctaaaggggaggacttctactgcgtgacttgccatgagaccaagtttgccaagcattgcgtgaagtgcaacaaggccatcacatctggaggaatcacttaccaggatcagccctggcatgccgattgctttgtgtgtgttacctgctctaagaagctggctgggcagcgtttcaccgctgtggaggaccagtattactgcgtggattgctacaagaactttgtggccaagaagtgtgctggatgcaagaaccccatcactgggaaaaggactgtgtcaagagtgagccacccagtctctaaagctaggaagcccccagtgtgccacgggaaacgcttgcctctcaccctgtttcccagcgccaacctccggggcaggcatccgggtggagagaggacttgtccctcgtgggtggtggttctttatagaaaaaatcgaagcttagcagctcctcgaggcccgggtttggtaaaggctccagtgtggtggcctatgaaggacaatcctggcacgactactgcttccactgcaaaaaatgctccgtgaatctggccaacaagcgctttgttttccaccaggagcaagtgtattgtcccgactgtgccaaaaagctgtaaactgacaggggctcctgtcctgtaaaatggcatttgaatctcgttctttgtgtccttctttctgccctataccatcaataggggaagagttccttcccttctttaaagttcctcccttccgtcttttctcccattttacagtattactcaaataagggcacacagtgatcatattagcatttagcaaaaagcaaccctgcagcaaagtgaatttctgtccggctgcaatttaaaaatgaaaacttaggtagattgactcttctgcatgtttctcatagagcagaaaagtgctaatcatttagccacttagtgatgtaagcaagaagcataggagataaaacccccactgagatgctctcatgcctcagctggacccaccgtgtagacacacgacatgcaagagttgcagcggctgctccaactcactgctcaccctctctgtgagcagaaagaaccctactgacatgcatggttaacttcctcatcagaactctgcccttcccttctgttcttttgtgctttcaaataactaacacgaacttccagaaaattaacatttgaacttagctgtaattctaaactgacctttccccgtactaacgtttggtttccccgtgtggcatgcttttctgagccttcctactttaaagcatggaacatgcaggtgatttgggaagtgtagaaagacctgagaaaacgagcctgtttcagaggaacatcgtcacaacgaatacttctggaagcttaacaaaactaaccctgctgtcctttttattgtttttaattaatatttttgttttaattgatagcaaaatagtttatgggtttggaaacttgcatgaaaatattttagccccctcagatgttcctgcagtgctgaaattcatcctacagaagtaaccgcaaaactctagc

SEQ ID NO: 34 - protein, 323 aa, Homo sapiens
MAEKFDCHYCRDPLQGKKYVQKDGHHCCLKCFDKFCANTCVECRKPIGADSKEVHYKNRFWHDTCFRCAKCLHPLANETFVAKDNKILCNKCTTREDSPKCKGCFKAIVAGDQNVEYKGTVWHKDCFTCSNCKQVIGTGSFFPKGEDFYCVTCHETKFAKHCVKCNKAITSGGITYQDQPWHADCFVCVTCSKKLAGQRFTAVEDQYYCVDCYKNFVAKKCAGCKNPITGKRTVSRVSHPVSKARKPPVCHGKRLPLTLFPSANLRGRHPGGERTCPSWVVVLYRKNRSLAAPRGPGLVKAPVWWPMKDNPGTTTASTAKNAP

SEQ ID NO: 35 - DNA, 4082 bp, Homo sapiens
gaggactgcgagcacagcggcggccgggtggcgggggtgagtggggccagcggggctggacagcagcgggccccgggcgccgccgccgcgatccctccccgcgcccgccgagcacatcgccgccgccgagatgggccctccgcggcacccccaggccggcgagatagaagcgggcggtgcgggcggcgggcggcggctacaggtggaaatgagttctcaacagtttcctcggttaggagccccttctaccgggctgagccaggccccttctcagattgcaaacagtggttctgctggattgataaacccagctgctacagtcaatgatgaatctggtcgagattctgaagtcagtgccagggagcacatgagttccagcagctccctccagtcccgggaggagaagcaagagcctgttgtggtaaggccctatccacaggtgcagatgttgtcgacacaccatgctgtcgcatcagccacacctgttgcagtgacagccccgccagcacacctgacgccagcagtgccactttcattttcggagggacttatgaagccgcccccgaagcccaccatgcctagccgtcccattgctcctgctccaccttctaccctgtcacttccccccaaggttccagggcaggttaccgttaccatggagagtagcatccctcaagcttcagccattcctgtggcaacaatcagtggacaacagggccatcccagtaacctgcatcacatcatgactacaaatgtgcaaatgtctatcatccgcagcaatgctcctgggccccctcttcacattggagcttctcatttacctcgaggtgcagctgctgctgctgtgatgtccagttctaaagtaaccacagtcctgaggccgacctcacagctgccaaatgctgctactgctcagccagcagtacagcacatcattcaccaaccaatccagtctcggccacctgtgaccacctccaatgccatccctcctgctgtggtagcaactgtctcagccaccagagctcagtctccagtcatcactacgacagcggcgcatgctactgattcagcacttagtaggccaaccttgtctatccagcatcctccatctgcagcaatcagtattcagcgtcctgcccagtcacgagatgtcacaacaagaatcacactaccatctcaccctgcattagggacgccaaaacagcagcttcatacaatggctcagaaaacaatcttcagtactggcacgccagtggctgcagccacagtagcacctattttggcaaccaacaccattccttcagcgaccacagctggatctgtgtcacacacgcaagctcccacaagtaccattgttaccatgacagtaccctcccattcctcccatgctactgctgtgaccacctcaaacatcccagtcgccaaggtggtgccccagcagatcacgcacacttctcctcggatccagccagactaccctgccgagaggagtagcctgattcccatctccggacatcgggcctctcccaatcctgtggccatggaaacccgaagtgacaacagaccgtctgttcccgttcagttccaatattttttgccaacttaccccccttctgcatacccactggcggcacatacctacaccccaatcaccagttccgtgtccactatccgacagtatccagtttcagctcaggctccaaactctgccatcacagctcagactggtgttggggtagcgtctaccgtccacctaaaccccatgcagttgatgacagtggatgcatcgcatgctcgacatattcaagggatccagccagcacccatcagtacccagggtatccagccggcccccattgggaccccagggatacagcctgcaccacttggcacacagggaattcactcagcaaccccaatcaacacacaagggcttcagcctgcacctatgggtactcagcagcctcagcctgaaggaaagacttcagcagtggtgttggcagatggagccacaattgtggccaaccctattagcaatccattcagtgctgctccagcagcaacaaccgtggtgcagacccacagccagagtgctagcaccaacgctcccgcccagggctcatcgccacggccaagcatactccggaagaaacctgccacagatggtgccaaacccaagtctgaaatccacgtgtctatggccactccggtcactgtgtccatggagactgtatccaatcaaaataatgatcagcctaccattgccgtccctccaactgcccagcagcccccaccgaccattccaactatgattgcagcagccagtcccccgtcacaaccagccgttgccctttcaaccattcctggagcggtccccatcactccacccatcaccaccattgcagctgcaccacctccatcagtcactgtgggtggcagtctttcctccgtcttgggccctcccgttcctgaaattaaagtgaaagaagaagtagaaccaatggatatcatgaggccagtttctgcagttcctccactggctaccaacactgtgtctccatctcttgcattgctggcaaacaacttgtccatgcctacaagtgacctaccacctggtgcctccccaaggaaaaagcctcgaaagcaacagcatgtgatctcaacagaagaaggtgacatgatggagacaaacagcactgatgatgagaagtccactgccaagagtcttctggtgaaggctgagaagcgcaagtctcctcccaaggagtatattgatgaggaaggtgtgagatatgtcccagtgcgtccaagaccccccattactttgcttcgtcactatcggaacccctggaaagctgcttaccaccactttcagaggtacagtgacgtccgggtcaaagaggagaagaaagctatgctgcaggaaatagctaatcagaaaggagtatcctgtcgtgctcaaggctggaaagtccacctctgtgctgcccagttactacagctgacgaatctagaacatgatgtctatgaaagacttactaacctgcaggaagggattatcccaaagaaaaaagcagcaacagatgatgatctccaccgaataaacgaactgatacagggaaatatgcagaggtgtaaacttgtgatggatcaaatcagtgaagccagagactccatgcttaaggttttagatcataaagaccgtgtcctgaagctgcttaacaagaacgggactgtcaaaaaagtgtccaaattgaagcgaaaggaaaaagtctagacccagaacaatcaggagattggaagcaaatttatgaagaatgatggtgggggtggggggagggttttggttttttccaaagtggaacattgaaataaaggaagtgttccttagttcccgtgtgaaagcagaggaacccatgacatccaagggcgtgaaaggatcagagctgactggacatagtgagctgccttcttgcgttcgggtgcacccctgttaaacctgatctgtgtcataagtgactccggatgcatcagtgtccaccagttggaagcaatgacaaggatggctggctggtgtttttcagccttccggtttatagactgtatttatctagtggattcctgcaggccccatactgagcctggactgaaagtatccactcggaccatctgttatctctctacactgaaaataaaacctcttccacccaccccattcggttcttctgcctgaccttcaaatgcccatgttggccttttacagcagtgccacggcaccaagcgagctgccacatctcacactctaaagggtttgaactattagttcttgtcattttttaaaaaaaaccattcccaagtgaaattgttatatcgtctgtcttgcgtgtgtcagaactgggtttttgtggaggttcagagcaggcaacaccataagttgctctcagatccttgttctgaagtacattcttggttatctgtacttctgtagctggtgtgatgctgttaattgtatgtaccacacatctccagacgttaataaaggactcaaagaggtttttgtaaaaaaaaaaaaaaaaaaaaaa

SEQ ID NO: 36 - protein, 1048 aa, Homo sapiens
MGPPRHPQAGEIEAGGAGGGRRLQVEMSSQQFPRLGAPSTGLSQAPSQIANSGSAGLINPAATVNDESGRDSEVSAREHMSSSSSLQSREEKQEPVVVRPYPQVQMLSTHHAVASATPVAVTAPPAHLTPAVPLSFSEGLMKPPPKPTMPSRPIAPAPPSTLSLPPKVPGQVTVTMESSIPQASAIPVATISGQQGHPSNLHHIMTTNVQMSIIRSNAPGPPLHIGASHLPRGAAAAAVMSSSKVTTVLRPTSQLPNAATAQPAVQHIIHQPIQSRPPVTTSNAIPPAVVATVSATRAQSPVITTTAAHATDSALSRPTLSIQHPPSAAISIQRPAQSRDVTTRITLPSHPALGTPKQQLHTMAQKTIFSTGTPVAAATVAPILATNTIPSATTAGSVSHTQAPTSTIVTMTVPSHSSHATAVTTSNIPVAKVVPQQITHTSPRIQPDYPAERSSLIPISGHRASPNPVAMETRSDNRPSVPVQFQYFLPTYPPSAYPLAAHTYTPITSSVSTIRQYPVSAQAPNSAITAQTGVGVASTVHLNPMQLMTVDASHARHIQGIQPAPISTQGIQPAPIGTPGIQPAPLGTQGIHSATPINTQGLQPAPMGTQQPQPEGKTSAVVLADGATIVANPISNPFSAAPAATTVVQTHSQSASTNAPAQGSSPRPSILRKKPATDGAKPKSEIHVSMATPVTVSMETVSNQNNDQPTIAVPPTAQQPPPTIPTMIAAASPPSQPAVALSTIPGAVPITPPITTIAAAPPPSVTVGGSLSSVLGPPVPEIKVKEEVEPMDIMRPVSAVPPLATNTVSPSLALLANNLSMPTSDLPPGASPRKKPRKQQHVISTEEGDMMETNSTDDEKSTAKSLLVKAEKRKSPPKEYIDEEGVRYVPVRPRPPITLLRHYRNPWKAAYHHFQRYSDVRVKEEKKAMLQEIANQKGVSCRAQGWKVHLCAAQLLQLTNLEHDVYERLTNLQEGIIPKKKAATDDDLHRINELIQGNMQRCKLVMDQISEARDSMLKVLDHKDRVLKLLNKNGTVKKVSKLKRKEKV

SEQ ID NO: 37 - DNA, 3707 bp, Homo sapiens
ctcacgcgtcgaggtgtagctacatagttatctgtgtacatccacgctggggcatttttctcctgcttaatgaggacttgactcgggagcaagtgtgaatcattgccggggctgggaaaggaggaaggcgcatttaaccccctcccacccctctccatgtccgtgtgtcactcggctcggtccacctggcgcggccggtcgtggggctgctgctgctgttgacgacgacgacgacgacgggggctgcctctgctgtcccgggagtttcctcctgctccggccacacagctcctggggattgttcctcttcgaaccagaacctcggcctgaccggcactttggctccaaaataactttatttttgggggagaaagcacatcacgaaccagtcaaaatcgtggtttatttctgtaacgtgaagacttctgctcttttttctttgtttgtttttttcgtaaacatctgggtgtatatcaaacggcaagatgtccagtaatgtcccggcggatatgataaatttgcgcctcattttggtaagcggaaaaacaaaagagttcctgttttctcctaacgattctgcttctgacattgcaaagcatgtatatgacaattggccaatggactgggaagaagagcaggtcagcagtccaaatattctacgacttatttatcaaggacgatttctacatggaaatgtcacattaggagcattaaaacttccttttggcaaaacaacagtgatgcatttggtggccagagagacattaccagagccaaactctcaaggtcagaggaatcgtgagaagactggagagagtaattgttgtgtaatcctgtaaacactgtctgcctagtgtgatgtgatatagtctttgtctttcatgctgctgggacagaaaagacccgacattgcttcagaaaccgttcagaacagtctgcctgtaaacacatggaactgaattaccacatgaacactgtcatcttttctcatgaaagtaaaaagaaccaagaacatttttcactctgattttttatttcttgtattttttgttgagctgttttaacacatattggtttttgaatgcagtcaatctccaggggaaaagttaacaagttatctttcgtagcagaaaccattttgctgccacaaaattttcatcatcagaactaataaatcaagtgttccaaatacaatttgcactaaaaagattggcattattttcctcatcagcagaatttataacagtgtgtggtatctagaaatacttatatatacaattccacactggaagacactcagcaattaatgaagttaattactgggccaacttgagaggaaaaaatggaaaagaaactaaaatgttgggtgaattctaccaaagtcagccgtggtggctgcactggcacagaatactaaactgagtgtgactattttcactgcaacaaatgaaaaaacaaaatgtgcctgtttaaagcactcagtagagggctgatgaaactaattttttttcctttaagacatgcactcttgagtcctacagtaactgagtgtttgtttagacagcacaagaaggggtgagagtgcgtctcctagccttaatgtgggagggtagtttcagtcactcatcggctttcattattgtgcagaaatattagaaaacctcattgatcaattttatgtatttgaatatcagcaaattgaaattttccataattatcattaatttgtaaccacatccagtgtcatgcttactccttagagttcagatgaattcttaaaattaaaaaaaaactccatagtactaattttgtttctttatatagtttgcgtttgatattagtgcttgcaattgtattaaagtcaaaagctgatttttatggcatacacaagaatgccactttttcttttatttcataccaataatttaaagattgatatgctaaaaacaatttgcacagcactaaagcatgagctactttcatctaaacctgtaaaaatatgaaagatttttatattttttcactgggaagaaattcttcctggatgaaattacaaatatgtgtagaatatatttaataaaagacttataaaatacctaactacaggacttaaaatatagattggcgcgtagtatatagaacaatattccatataaataagtttagcctttataaaaatgaagttgcaggctgacattacattcggtacttactaagtgtcaacagcccttacaaacattaaatgtaaatggtttcaaatggtcagcgttgtttaaatgtaatcatgttattttattcattgttaatgctttgatgaaaaggctttatatgcagtagatctacgaaaatattgttcatactgatcagaattaaatttgtatagagcagagttttaaaatgaatgtaaatagcactaaacgttttctttctgcaacctgtacttacagattcttcctgtaaactaaataaaaaaaaaaatgatagtgcattttggtggtaattttaaaggtcttgattaggtcaataattgtttaagcaccgtctcattcatgttttctactttcatttcttaagcttttaaaattcatttaattaatattctgttgttgttttggggagtattcccaatgtatctttgatatttaacctggttaatttgtggacagtcacaacaatggatagaattatgtagtctccgttatcactaaaatgttatcttcaagagatgttaaatatttatatgctttgttgactagctgaaatatgaattctgttagtgttgactaaagaatctggtagttgcttaattgggcaattaaacaatttatggctctattttgtaaaacaaactactggtaattatttttaatacctattttcattctgattactctttttttaagttaaagactatcagttaattaagattgagtttttatgatggttaaaaataattctctattggtttttcaatatatttttctgtgtgttctcagattatatatttccctcaatttagagtttgctaagtgaaataaactggttcactagtagagaaagaattacgtcgcttaatacctaatatcatagttgtacaatatgaaaaaaagaataaaaagtagcagtaaaattatatactgaaaacaccaaaaatttagatgccttaatagtatatacgtgaaatactcagctgtccctttaaaaataattcattggactgcctggtggttaaaatacgattcctcatatccaaggctacttttgaagatccctctgccaaaaatatagctcacttatctaaaggtgagagctgcatagatccagtaatgtacataaagcctgaatgatgagcctatgtccctgcctaacactggtgtctcactcatctcttttacctaaattgtcctgaactttgttaagtgttctggacaaggccaagcttttctttattaaaacctcagcatgtctccctgatctgaactatttgctttctcttcaagataagttgtattttaccatggaaaaatacagtatctaacattaccattcacgttaaatgaagtttcctcataacatttatctttagttttatgaagtcatcgtgaccaatgttacagtaatttctgttagctgattgtggtaaacaatgtttaatgtgaaaagaaattaaaactttcttcatctgttgtagaaaaaaaaaaaaaaaa

SEQ ID NO: 38 - protein, 117 aa, Homo sapiens
MSSNVPADMINLRLILVSGKTKEFLFSPNDSASDIAKHVYDNWPMDWEEEQVSSPNILRLIYQGRFLHGNVTLGALKLPFGKTTVMHLVARETLPEPNSQGQRNREKTGESNCCVIL

SEQ ID NO: 39 - DNA, 4586 bp, Homo sapiens
tatacttcgctacttggctagagttgcaactacagctgggttatatggctctaatctgatggaacatactgagattgatcactggttggagttcagtgctacaaaattatcttcatgtgattcctttacttctacaattaatgaactcaatcattgcctgtctctgagaacatacttagttggaaactccttgagtttagcagatttatgtgtttgggccaccctaaaaggaaatgctgcctggcaagaacagttgaaacagaagaaagctccagttcatgtaaaacgttggtttggctttcttgaagcccagcaggccttccagtcagtaggtaccaagtgggatgtttcaacaaccaaagctcgagtggcacctgagaaaaagcaagatgttgggaaatttgttgagcttccaggtgcggagatgggaaaggttaccgtcagatttcctccagaggccagtggttacttacacattgggcatgcaaaagctgctcttctgaaccagcactaccaggttaactttaaagggaaactgatcatgagatttgatgacacaaatcctgaaaaagaaaaggaagattttgagaaggttatcttggaagatgttgcaatgttgcatatcaaaccagatcaatttacttatacttcggatcattttgaaactataatgaagtatgcagagaagctaattcaagaagggaaggcttatgtggatgatactcctgctgaacagatgaaagcagaacgtgagcagaggatagaatctaaacatagaaaaaaccctattgagaagaatctacaaatgtgggaagaaatgaaaaaagggagccagtttggtcactcctgttgtttgcgagcaaaaattgacatgagtagtaacaatggatgcatgagagatccaaccctttatcgctgcaaaattcaaccacatccaagaactggaaataaatacaatgtttatccaacatatgattttgcctgccccatagttgacagcatcgaaggtgttacacatgccctgagaacaacagaataccatgacagagatgagcagttttactggattattgaagctttaggcataagaaaaccatatatttgggaatatagtcggctaaatctcaacaacacagtgctatccaaaagaaaactcacatggtttgtcaatgaaggactagtagatggatgggatgacccaagatttcctacggttcgtggtgtactgagaagagggatgacagttgaaggactgaaacagtttattgctgctcagggctcctcacgttcagtcgtgaacatggagtgggacaaaatctgggcgtttaacaaaaaggttattgacccagtggctccacgatatgttgcattactgaagaaagaagtgatcccagtgaatgtacctgaagctcaggaggagatgaaagaagtagccaaacacccaaagaatcctgaggttggcttgaagcctgtgtggtatagtcccaaagttttcattgaaggtgctgatgcagagactttttcggagggtgagatggttacatttataaattggggcaacctcaacattacaaaaatacacaaaaatgcagatggaaaaatcatatctcttgatgcaaagtttaatttggaaaacaaagactacaagaaaaccactaaggtcacttggcttgcagagactacacatgctcttcctattccagtaatctgtgtcacttatgagcacttgatcacaaagccagtgctaggaaaagacgaggactttaagcagtatgtcaacaagaacagtaagcatgaagagctaatgctaggggatccctgccttaaggatttgaaaaaaggagatattatacaactccagagaagaggattcttcatatgtgatcaaccttatgaacctgttagcccatatagttgcaaggaagccccgtgtgttttgatatacattcctgatgggcacacaaaggaaatgccaacatcagggtcaaaggaaaagaccaaagtagaagccacaaaaaatgagacctctgctccttttaaggaaagaccaacaccttctctgaataataattgtactacatctgaggattccttggtcctttacaatagagtggctgttcaaggagatgtggttcgtgaattaaaagccaagaaagcaccaaaggaagatgtagatgcagctgtaaaacagcttttgtctttgaaagctgaatataaggagaaaactggccaggaatataaacctggaaaccctcctgctgaaataggacagaatatttcttctaattcctcagcaagtattctggaaagtaaatctctgtatgatgaagttgctgcacaaggggaggtggttcgtaagctaaaagctgaaaaatcccctaaggctaaaataaatgaagctgtagaatgcttactgtccctgaaggctcagtataaagaaaaaactgggaaggagtacatacctggtcagcccccattatctcaaagttcggattcaagcccaaccagaaattctgaacctgctggtttagaaacaccagaagcgaaagtactttttgacaaagtagcttctcaaggggaagtagttcggaaacttaaaactgaaaaagcccctaaggatcaagtagatatagctgttcaagaactccttcagctaaaggcacagtacaagtctttgataggagtagagtataagcctgtgtcggccactggagctgaggacaaagataagaagaagaaagaaaaagaaaataaatctgaaaagcagaataagcctcagaaacaaaatgatggccaaaggaaagacccttctaaaaaccaaggaggtgggctctcatcaagtggagcaggagaagggcaggggcctaagaaacagaccaggttgggtcttgaggcaaaaaaagaagaaaatcttgctgattggtattctcaggtcatcacaaagtcagaaatgattgaataccatgacataagtggctgttatattcttcgtccctgggcctatgccatttgggaagccatcaaggacttttttgatgctgagatcaagaaacttggtgttgaaaactgctacttccccatgtttgtgtctcaaagtgcattagagaaagagaagactcatgttgctgactttgccccagaggttgcttgggttacaagatctggcaaaaccgagctggcagaaccaattgccattcgtcctactagtgaaacagtaatgtatcctgcatatgcaaaatgggtacaatcacacagagacctgcccatcaagctcaatcagtggtgcaatgtggtgcgttgggaattcaagcatcctcagcctttcctacgtactcgtgaatttctttggcaggaagggcacagtgcttttgctaccatggaagaggcagcggaagaggtcttgcagatacttgacttatatgctcaggtatatgaagaactcctggcaattcctgttgttaaaggaagaaagacggaaaaggaaaaatttgcaggaggagactatacaactacaatagaagcatttatatctgctagtggaagagctatccagggaggaacatcacatcatttagggcagaatttttccaaaatgtttgaaatcgtttttgaagatccaaagataccaggagagaagcaatttgcctatcaaaactcctggggcctgacaactcgaactattggtgttatgaccatggttcatggggacaacatgggtttagtattaccaccccgtgtagcatgtgttcaggtggtgattattccttgtggcattaccaatgcactttctgaagaagacaaagaagcgctgattgcaaaatgcaatgattatcgaaggcgattactcagtgttaacatccgcgttagagctgatttacgagataattattctccaggttggaaattcaatcactgggagctcaagggagttcccattagacttgaagttgggccacgtgatatgaagagctgtcagtttgtagccgtcagacgagatactggagaaaagctgacagttgctgaaaatgaggcagagactaaacttcaagctattttggaagacatccaggtcacccttttcacaagggcttctgaagaccttaagactcatatggttgtggctaatacaatggaagactttcagaagatactagattctggaaagattgttcagattccattctgtggggaaattgactgtgaggactggatcaaaaagaccactgccagggatcaagatcttgaacctggtgctccatccatgggagctaaaagcctttgcatccccttcaaaccactctgtgaactgcagcctggagccaaatgtgtctgtggcaagaaccctgccaagtactacaccttatttggtcgcagctactgagggatgaacgaaagccccctcttcaactcctctcactttttaaagcattgatattagtatcttctcagatacagaccgttttatgattttttaaaaagtaaaagttctaaaatgaagtcacacaggacaattattcttatgcctaagttaacagtggataaaagacttttctgtaaacaactccagtaataaatatcatgaacta

SEQ ID NO: 40 - protein, 1440 aa, Homo sapiens
MEHTEIDHWLEFSATKLSSCDSFTSTINELNHCLSLRTYLVGNSLSLADLCVWATLKGNAAWQEQLKQKKAPVHVKRWFGFLEAQQAFQSVGTKWDVSTTKARVAPEKKQDVGKFVELPGAEMGKVTVRFPPEASGYLHIGHAKAALLNQHYQVNFKGKLIMRFDDTNPEKEKEDFEKVILEDVAMLHIKPDQFTYTSDHFETIMKYAEKLIQEGKAYVDDTPAEQMKAEREQRIESKHRKNPIEKNLQMWEEMKKGSQFGHSCCLRAKIDMSSNNGCMRDPTLYRCKIQPHPRTGNKYNVYPTYDFACPIVDSIEGVTHALRTTEYHDRDEQFYWIIEALGIRKPYIWEYSRLNLNNTVLSKRKLTWFVNEGLVDGWDDPRFPTVRGVLRRGMTVEGLKQFIAAQGSSRSVVNMEWDKIWAFNKKVIDPVAPRYVALLKKEVIPVNVPEAQEEMKEVAKHPKNPEVGLKPVWYSPKVFIEGADAETFSEGEMVTFINWGNLNITKIHKNADGKIISLDAKFNLENKDYKKTTKVTWLAETTHALPIPVICVTYEHLITKPVLGKDEDFKQYVNKNSKHEELMLGDPCLKDLKKGDIIQLQRRGFFICDQPYEPVSPYSCKEAPCVLIYIPDGHTKEMPTSGSKEKTKVEATKNETSAPFKERPTPSLNNNCTTSEDSLVLYNRVAVQGDVVRELKAKKAPKEDVDAAVKQLLSLKAEYKEKTGQEYKPGNPPAEIGQNISSNSSASILESKSLYDEVAAQGEVVRKLKAEKSPKAKINEAVECLLSLKAQYKEKTGKEYIPGQPPLSQSSDSSPTRNSEPAGLETPEAKVLFDKVASQGEVVRKLKTEKAPKDQVDIAVQELLQLKAQYKSLIGVEYKPVSATGAEDKDKKKKEKENKSEKQNKPQKQNDGQRKDPSKNQGGGLSSSGAGEGQGPKKQTRLGLEAKKEENLADWYSQVITKSEMIEYHDISGCYILRPWAYAIWEAIKDFFDAEIKKLGVENCYFPMFVSQSALEKEKTHVADFAPEVAWVTRSGKTELAEPIAIRPTSETVMYPAYAKWVQSHRDLPIKLNQWCNVVRWEFKHPQPFLRTREFLWQEGHSAFATMEEAAEEVLQILDLYAQVYEELLAIPVVKGRKTEKEKFAGGDYTTTIEAFISASGRAIQGGTSHHLGQNFSKMFEIVFEDPKIPGEKQFAYQNSWGLTTRTIGVMTMVHGDNMGLVLPPRVACVQVVIIPCGITNALSEEDKEALIAKCNDYRRRLLSVNIRVRADLRDNYSPGWKFNHWELKGVPIRLEVGPRDMKSCQFVAVRRDTGEKLTVAENEAETKLQAILEDIQVTLFTRASEDLKTHMVVANTMEDFQKILDSGKIVQIPFCGEIDCEDWIKKTTARDQDLEPGAPSMGAKSLCIPFKPLCELQPGAKCVCGKNPAKYYTLFGRSY

SEQ ID NO: 41 - DNA, 1539 bp, Homo sapiens
  misc_feature (1536)..(1536): n is a, c, g, or t
tgcaggagttcatgatcctcccagtcggtgcagcaaacttcagggaagccatgcgcattggagcagaggtttaccacaacctgaagaatgtcatcaaggagaaatatgggaaagatgccaccaatgtgggggatgaaggcgggtttgctcccaacatcctggagaataaagaaggcctggagctgctgaagactgctattgggaaagctggctacactgataaggtggtcatcggcatggacgtagcggcctccgagttcttcaggtctgggaagtatgacctggacttcaagtctcccgatgaccccagcaggtacatctcgcctgaccagctggctgacctgtacaagtccttcatcaaggactacccagtggtgtctatcgaagatccctttgaccaggatgactggggagcttggcagaagttcacagccagtgcaggaatccaggtagtgggggatgatctcacagtgaccaacccaaagaggatcgccaaggccgtgaacgagaagtcctgcaactgcctcctgctcaaagtcaaccagattggctccgtgaccgagtctcttcaggcgtgcaagctggcccaggccaatggttggggcgtcatggtgtctcatcgttcgggggagactgaagataccttcatcgctgacctggttgtggggctgtgcactgggcagatcaagactggtgccccttgccgatctgagcgcttggccaagtacaaccagctcctcagaattgaagaggagctgggcagcaaggctaagtttgccggcaggaacttcagaaaccccttggccaagtaagctgtgggcaggcaagccttcggtcacctgttggctacacagacccctcccctcgtgtcagctcaggcagctcgaggcccccgaccaacacttgcaggggtccctgctagttagcgccccaccgccgtggagttcgtaccgcttccttagaacttctacagaagccaagctccctggagccctgttggcagctctagcttttgcagtcgtgtaatgggcccaagtcattgtttttctcgcctcactttccaccaagtgtctagagtcatgtgagcctcgtgtcatctccggggtggccacaggctagatccccggtggttttgtgctcaaaataaaaagcctcagtgacccatgagacggagatctcgccggctttacgttcacctcggtgtctgcagcaccctccgcttcctctcctaggcgacgagacccagtggctagaagttcaccatgtctattctcaagatccatgccagggagatctttgactctcgcgggaatcccactgttgaggttgatctcttcacctcaaaataaaaagcctcagtgaccctgcatttgagggttcagcagcatataccttcacactaggtttcagagcctgggaagaggaatattaagacatcttaacaacaaaccacaacattgcctgcatgtctaaaagaaaatatgggcctggtgtggtggctcacacctgtaatcccaacactttgggagcccgagncag

SEQ ID NO: 42 - protein, 269 aa, Homo sapiens
QEFMILPVGAANFREAMRIGAEVYHNLKNVIKEKYGKDATNVGDEGGFAPNILENKEGLELLKTAIGKAGYTDKVVIGMDVAASEFFRSGKYDLDFKSPDDPSRYISPDQLADLYKSFIKDYPVVSIEDPFDQDDWGAWQKFTASAGIQVVGDDLTVTNPKRIAKAVNEKSCNCLLLKVNQIGSVTESLQACKLAQANGWGVMVSHRSGETEDTFIADLVVGLCTGQIKTGAPCRSERLAKYNQLLRIEEELGSKAKFAGRNFRNPLAK

SEQ ID NO: 43 - DNA, 426 bp, Homo sapiens
  misc_feature (34)..(34): n is a, c, g, or t
  misc_feature (115)..(115): n is a, c, g, or t
  misc_feature (321)..(321): n is a, c, g, or t
  misc_feature (356)..(356): n is a, c, g, or t
  misc_feature (359)..(359): n is a, c, g, or t
  misc_feature (378)..(378): n is a, c, g, or t
  misc_feature (385)..(385): n is a, c, g, or t
  misc_feature (394)..(394): n is a, c, g, or t
acgactggaatgtatggaatcaactatttcgagntaaaaaacaagaaaggaacagacctttggcttggagttgatgcccttggactgaatatttatgagaaagatgataagttanccccaaagattggctttccttggagtgaaatcaggaacatctctttcaatgacaaaaagtttgtcattaaacccatcgacaagaaggcacctgactttgtgttttatgccccacgtctgagaatcaacaagcggatcctgcagctctgcatgggcaaccatgagttgtatatgcgccgcaggaagcctgacaccatcgaggtgcancagatgaaggcccaggcccgggaggaggacacaanccntggacagagacaaacaccncatgatnccccacaangaggaattgatgctgcggctgcaggactatga

SEQ ID NO: 44 - protein, 141 aa, Homo sapiens
  misc_feature (12)..(12): Xaa can be any naturally occurring amino acid
  misc_feature (39)..(39): Xaa can be any naturally occurring amino acid
  misc_feature (107)..(107): Xaa can be any naturally occurring amino acid
  misc_feature (119)..(120): Xaa can be any naturally occurring amino acid
  misc_feature (129)..(129): Xaa can be any naturally occurring amino acid
  misc_feature (132)..(132): Xaa can be any naturally occurring amino acid
TTGMYGINYFEXKNKKGTDLWLGVDALGLNIYEKDDKLXPKIGFPWSEIRNISFNDKKFVIKPIDKKAPDFVFYAPRLRINKRILQLCMGNHELYMRRRKPDTIEVXQMKAQAREEDTXXGQRQTPHDXPQXGIDAAAAGL

SEQ ID NO: 45 - DNA, 1911 bp, Homo sapiens
gtgttctagaacagatcagacattttgtaatgatgcctgaaataaacactaaccacctcgacaagcaacaggttcaactcctggcagagatgtgtatccttattgatgaaaatgacaataaaattggagctgagaccaagaagaattgtcacctgaacgagaacattgagaaaggattattgcatcgagcttttagtgtcttcttattcaacaccgaaaataagcttctgctacagcaaagatcagatgctaagattacctttccaggttgttttacgaatacgtgttgtagtcatccattaagcaatccagccgagcttgaggaaagtgacgcccttggagtgaggcgagcagcacagagacggctgaaagctgagctaggaattcccttggaagaggttcctccagaagaaattaattatttaacacgaattcactacaaagctcagtctgatggtatctggggtgaacatgaaattgattacattttgttggtgaggaagaatgtaactttgaatccagatcccaatgagattaaaagctattgttatgtgtcaaaggaagaactaaaagaacttctgaaaaaagcagccagtggtgaaattaagataacgccatggtttaaaattattgcagcgacttttctctttaaatggtgggataacttaaatcatttgaatcagtttgttgaccatgagaaaatatacagaatgtgaatatgtaggtaaatgattacagaaaaatttatctgcttaacaaacttagaatgactttttccttttaaatttagttctatcattaatttatcattaaatttagttctatcatttggtactatcattaatgtattatatacactgatactttaaaacttgtgtggaaaaaactaacttataattttgtatcacacaccctggatatgtgttctgtttctaagcgacatttgtgagagattattgtaaaatgagagcgagcaaataaaacttaatttaatctttgcagatacatacttatgggaaatttgaacaaatgagtgaaactctgtgtttttagtaggctgtgataaacatttccggagcacttgcagaggacttgctatttgccaggtgctttatgtatcattaaatttttctcatagttcagaaaaatgtgcaaaggaaactattgtctcgctccttcaaaacagtcttaattaactttcatattagcagattaaactagcagagcaggttcaagggaaattaaatgatatggaccctaatttgtatcattctgagttgattgtgtggtttattcattctggaaacatgttgatacttacagtcagccactgcttttgataagtgatattgattaggttgaatcttcttgtaaatagtatttaccagttagcaaagtctgtgttttcagaattacagtgagcacagaggtgttcataaaatgggaattgagtcccactcggtaagagttgcttaaacttgacactgttgacatttgggctggataaaacccctgtggtggggtctgtgctgtgcattgcaggatggtgagcagcgtccctctcatgtgacacccacagttatgccggatgttgccagatgcccctaggggacagagtcaacccccaactgaggaccactgtcctacagagtcaggaaatattgtagggagaaaaaaataacaacaacaaaggcctgtgttaatgttaaatagatgagattatggaatgtgtatattaatgttaaaaattgtaccttgatcaatgtactttttataaacttgccatagatatctcagatttgaaacctcaagacagatttattattcttaaatgctgtatgataatgaagaaaaataaaaatttatttcttgcaaagttacaaaaaaaaaaaaaaaaaaaaaaaaaaaaaa

SEQ ID NO: 46 - protein, 237 aa, Homo sapiens
VLEQIRHFVMMPEINTNHLDKQQVQLLAEMCILIDENDNKIGAETKKNCHLNENIEKGLLHRAFSVFLFNTENKLLLQQRSDAKITFPGCFTNTCCSHPLSNPAELEESDALGVRRAAQRRLKAELGIPLEEVPPEEINYLTRIHYKAQSDGIWGEHEIDYILLVRKNVTLNPDPNEIKSYCYVSKEELKELLKKAASGEIKITPWFKIIAATFLFKWWDNLNHLNQFVDHEKIYRM

SEQ ID NO: 47 - DNA, 3347 bp, Homo sapiens
  misc_feature (1871)..(1871): n is a, c, g, or t
  misc_feature (1880)..(1880): n is a, c, g, or t
  misc_feature (2479)..(2479): n is a, c, g, or t
  misc_feature (2899)..(2899): n is a, c, g, or t
ggccctcctggtcccaagggtaacagcggtgaacctggtgctcctggcagcaaaggagacactggtgctaagggagagcctggccctgttggtgttcaaggaccccctggccctgctggagaggaaggaaagcgaggagctcgaggtgaacccggacccactggcctgcccggaccccctggcgagcgtggtggacctggtagccgtggtttccctggcgcagatggtgttgctggtcccaagggtcccgctggtgaacgtggttctcctggccccgctggccccaaaggatctcctggtgaagctggtcgtcccggtgaagctggtctgcctggtgccaagggtctgactggaagccctggcagccctggtcctgatggcaaaactggcccccctggtcccgccggtcaagatggtcgccccggacccccaggcccacctggtgcccgtggtcaggctggtgtgatgggattccctggacctaaaggtgctgctggagagcccggcaaggctggagagcgaggtgttcccggaccccctggcgctgtcggtcctgctggcaaagatggagaggctggagctcagggaccccctggccctgctggtcccgctggcgagagaggtgaacaaggccctgctggctcccccggattccagggtctccctggtcctgctggtcctccaggtgaagcaggcaaacctggtgaacagggtgttcctggagaccttggcgcccctggcccctctggagcaagaggcgagagaggtttccctggcgagcgtggtgtgcaaggtccccctggtcctgctggaccccgaggggccaacggtgctcccggcaacgatggtgctaagggtgatgctggtgcccctggagctcccggtagccagggcgcccctggccttcagggaatgcctggtgaacgtggtgcagctggtcttccagggcctaagggtgacagaggtgatgctggtcccaaaggtgctgatggctctcctggcaaagatggcgtccgtggtctgaccggccccattggtcctcctggccctgctggtgcccctggtgacaagggtgaaagtggtcccagcggccctgctggtcccactggagctcgtggtgcccccggagaccgtggtgagcctggtccccccggccctgctggctttgctggcccccctggtgctgacggccaacctggtgctaaaggcgaacctggtgatgctggtgccaaaggcgatgctggtccccctgggcctgccggacccgctggaccccctggccccattggtaatgttggtgctcctggagccaaaggtgctcgcggcagcgctggtccccctggtgctactggtttccctggtgctgctggccgagtcggtcctcctggcccctctggaaatgctggaccccctggccctcctggtcctgctggcaaagaaggcggcaaaggtccccgtggtgagactggccctgctggacgtcctggtgaagttggtccccctggtccccctggccctgctggcgagaaaggatcccctggtgctgatggtcctgctggtgctcctggtactcccgggcctcaaggtattgctggacagcgtggtgtggtcggcctgcctggtcagagaggagagagaggcttccctggtcttcctggcccctctggtgaacctggcaaacaaggtccctctggagcaagtggtgaacgtggtccccccggtcccatgggcccccctggattggctggaccccctggtgaatctggacgtgagggggctcctgctgccgaaggttcccctggacgagacggttctcctggcgccaagggtgaccgtggtgagaccggccccgctggaccccctggtgctcntggtgctcntggtgcccctggccccgttggccctgctggcaagagtggtgatcgtggtgagactggtcctgctggtcccgccggtcccgtcggccccgctggcgcccgtggccccgccggaccccaaggcccccgtggtgacaagggtgagacaggcgaacagggcgacagaggcataaagggtcaccgtggcttctctggcctccagggtccccctggccctcctggctctcctggtgaacaaggtccctctggagcctctggtcctgctggtccccgaggtccccctggctctgctggtgctcctggcaaagatggactcaacggtctccctggccccattgggccccctggtcctcgcggtcgcactggtgatgctggtcctgttggtccccccggccctcctggacctcctggtccccctggtcctcccagcgctggtttcgacttcagcttcctcccccagccacctcaagagaaggctcacgatggtggccgctactaccgggctgatgatgccaatgtggttcgtgaccgtgacctcgaggtggacaccaccctcaagagcctgagccagcagatcgagaacatccggagcccagagggcncccgcaagaaccccgcccgcacctgccgtgacctcaagatgtgccactctgactggaagagtggagagtactggattgaccccaaccaaggctgcaacctggatgccatcaaagtcttctgcaacatggagactggtgagacctgcgtgtaccccactcagcccagtgtggcccagaagaactggtacatcagcaagaaccccaaggacaagaggcatgtctggttcggcgagagcatgaccgatggattccagttcgagtatggcggccagggctccgaccctgccgatgtggccatccagctgaccttcctgcgcctgatgtccaccgaggcctcccagaacatcacctaccactgcaagaacagcgtggcctacatggaccagcagactggcaacctcaagaaggccctgctcctcnagggctccaacgagatcgagatccgcgccgagggcaacagccgcttcacctacagcgtcactgtcgatggctgcacgagtcacaccggagcctggggcaagacagtgattgaatacaaaaccaccaagtcctcccgcctgcccatcatcgatgtggcccccttggacgttggtgccccagaccaggaattcggcttcgacgttggccctgtctgcttcctgtaaactccctccatcccaacttggctccctcccacccaaccaactttccccccaacccggaacagacaagcaacccaaactgaaccccctcaaaagccaaaaaatgggagacaatttcacatggactttggaaaatatttttttcctttgcattcatctctcaaacttagtttttatctttgaccaaccgaacatgaccaaaaaccaaaagtgcattcaaccttacc

SEQ ID NO: 48 - protein, 1040 aa, Homo sapiens
  misc_feature (624)..(624): Xaa can be any naturally occurring amino acid
  misc_feature (627)..(627): Xaa can be any naturally occurring amino acid
  misc_feature (827)..(827): Xaa can be any naturally occurring amino acid
  misc_feature (967)..(967): Xaa can be any naturally occurring amino acid
GPPGPKGNSGEPGAPGSKGDTGAKGEPGPVGVQGPPGPAGEEGKRGARGEPGPTGLPGPPGERGGPGSRGFPGADGVAGPKGPAGERGSPGPAGPKGSPGEAGRPGEAGLPGAKGLTGSPGSPGPDGKTGPPGPAGQDGRPGPPGPPGARGQAGVMGFPGPKGAAGEPGKAGERGVPGPPGAVGPAGKDGEAGAQGPPGPAGPAGERGEQGPAGSPGFQGLPGPAGPPGEAGKPGEQGVPGDLGAPGPSGARGERGFPGERGVQGPPGPAGPRGANGAPGNDGAKGDAGAPGAPGSQGAPGLQGMPGERGAAGLPGPKGDRGDAGPKGADGSPGKDGVRGLTGPIGPPGPAGAPGDKGESGPSGPAGPTGARGAPGDRGEPGPPGPAGFAGPPGADGQPGAKGEPGDAGAKGDAGPPGPAGPAGPPGPIGNVGAPGAKGARGSAGPPGATGFPGAAGRVGPPGPSGNAGPPGPPGPAGKEGGKGPRGETGPAGRPGEVGPPGPPGPAGEKGSPGADGPAGAPGTPGPQGIAGQRGVVGLPGQRGERGFPGLPGPSGEPGKQGPSGASGERGPPGPMGPPGLAGPPGESGREGAPAAEGSPGRDGSPGAKGDRGETGPAGPPGAXGAXGAPGPVGPAGKSGDRGETGPAGPAGPVGPAGARGPAGPQGPRGDKGETGEQGDRGIKGHRGFSGLQGPPGPPGSPGEQGPSGASGPAGPRGPPGSAGAPGKDGLNGLPGPIGPPGPRGRTGDAGPVGPPGPPGPPGPPGPPSAGFDFSFLPQPPQEKAHDGGRYYRADDANVVRDRDLEVDTTLKSLSQQIENIRSPEGXRKNPARTCRDLKMCHSDWKSGEYWIDPNQGCNLDAIKVFCNMETGETCVYPTQPSVAQKNWYISKNPKDKRHVWFGESMTDGFQFEYGGQGSDPADVAIQLTFLRLMSTEASQNITYHCKNSVAYMDQQTGNLKKALLLXGSNEIEIRAEGNSRFTYSVTVDGCTSHTGAWGKTVIEYKTTKSSRLPIIDVAPLDVGAPDQEFGFDVGPVCFL

SEQ ID NO: 49 - DNA, 478 bp, Homo sapiens
ttccattttgaacaacttttattatacgtttagtgttctctatacaaaagaaatcagtttttttacagtgattcaaaaaaaattcagaataatttggccttttcattgctcatgcagtcagtttataagtccatgtattagacggccctccatggcccagaagtcttccctgctgaaggtcgtgtgtgacaccctcagatacgcatctgtcactgacaaagttggttaatgcaaaataactcgcaaaaaaggaaagaacatgatgtgagaggggttaaaacaaggtctggcatggagttaaatgtttaaccaatggaaaaaagatcagaccaatttgtgtgtgtgtggatatgtaggaagggatggagacgctgggaaaaaaaattccccacgggaaagaacaaattggaatggtgggggatatgggtgtgtggtgggggcggggcaggaggtcctccgtggtccagcatgggtcggg

SEQ ID NO: 50 - protein, 1024 aa, Homo sapiens
MTMITDSLAVVLQRRDWENPGVTQLNRLAAHPPFASWRNSEEARTDRPSQQLRSLNGEWRFAWFPAPEAVPESWLECDLPEADTVVVPSNWQMHGYDAPIYTNVTYPITVNPPFVPTENPTGCYSLTFNVDESWLQEGQTRIIFDGVNSAFHLWCNGRWVGYGQDSRLPSEFDLSAFLRAGENRLAVMVLRWSDGSYLEDQDMWRMSGIFRDVSLLHKPTTQISDFHVATRFNDDFSRAVLEAEVQMCGELRDYLRVTVSLWQGETQVASGTAPFGGEIIDERGGYADRVTLRLNVENPKLWSAEIPNLYRAVVELHTADGTLIEAEACDVGFREVRIENGLLLLNGKPLLIRGVNRHEHHPLHGQVMDEQTMVQDILLMKQNNFNAVRCSHYPNHPLWYTLCDRYGLYVVDEANIETHGMVPMNRLTDDPRWLPAMSERVTRMVQRDRNHPSVIIWSLGNESGHGANHDALYRWIKSVDPSRPVQYEGGGADTTATDIICPMYARVDEDQPFPAVPKWSIKKWLSLPGETRPLILCEYAHAMGNSLGGFAKYWQAFRQYPRLQGGFVWDWVDQSLIKYDENGNPWSAYGGDFGDTPNDRQFCMNGLVFADRTPHPALTEAKHQQQFFQFRLSGQTIEVTSEYLFRHSDNELLHWMVALDGKPLASGEVPLDVAPQGKQLIELPELPQPESAGQLWLTVRVVQPNATAWSEAGHISAWQQWRLAENLSVTLPAASHAIPHLTTSEMDFCIELGNKRWQFNRQSGFLSQMWIGDKKQLLTPLRDQFTRAPLDNDIGVSEATRIDPNAWVERWKAAGHYQAEAALLQCTADTLADAVLITTAHAWQHQGKTLFISRKTYRIDGSGQMAITVDVEVASDTPHPARIGLNCQLAQVAERVNWLGLGPQENYPDRLTAACFDRWDLPLSDMYTPYVFPSENGLRCGTRELNYGPHQWRGDFQFNISRYSQQQLMETSHRHLLHAEEGTWLNIDGFHMGIGGDDSWSPSVSAEFQLSAGRYHYQLVWCQK

SEQ ID NO: 51 - DNA, 1210 bp, Homo sapiens
gctggactgctcgctggccggcagcgcaccgttttgaaggtcctagcccacctgggctggctcacgcgcacgactagccgctcccatacagcacgcccggactctgtcgtcgcttaaggccactcctattctacggctgacccctggtggtcacgtggatctgttcgccacgcaagtctgggtccttcggcgattgaccggggtccttgctgttcgggagcctctcctaagctgcctgttcgcgcgagagtttggaggggcgggtttggggtcggtgtctgattggggctcgcaccgcagcacgctggagtcccgcttaggtaccagttagcgtcaggggagctgggtcaggcggtcgccgggacaccccgtgtgtggcaggcggcgaagcgctctggagaatcccggacagccctgctccctgcagccaggtgtagtttcgggagccactggggccaaagtgagagtccagcggtcttccagcgcttgggccacggcggcggccctgggagcagaggtggagcgaccccattacgctaaagatgaaaggctggggttggctggccctgcttctgggggccctgctgggaaccgcctgggctcggaggagccaggatctccactgtggagcatgcagggctctggtggatgaactagaatgggaaattgcccaggtggaccccaagaagaccattcagatgggatctttccggatcaatccagatggcagccagtcagtggtggaggtgccttatgcccgctcagaggcccacctcacagagctgctggaggagatatgtgaccggatgaaggagtatggggaacagattgatccttccacccatcgcaagaactacgtacgtgtagtgggccggaatggagaatccagtgaactggacctacaaggcatccgaatcgactcagatattagcggcaccctcaagtttgcgtgtgagagcattgtggaggaatacgaggatgaactcattgaattcttttcccgagaggctgacaatgttaaagacaaactttgcagtaagcgaacagatctttgtgaccatgccctgcacatatcgcatgatgagctatgaaccactggagcagcccacactggcttgatggatcacccccaggaggggaaaatggtggcaatgccttttatatattatgtttttactgaaattaactgaaaaaatatgaaaccaaaagt

SEQ ID NO: 52 - protein, 182 aa, Homo sapiens
MKGWGWLALLLGALLGTAWARRSQDLHCGACRALVDELEWEIAQVDPKKTIQMGSFRINPDGSQSVVEVPYARSEAHLTELLEEICDRMKEYGEQIDPSTHRKNYVRVVGRNGESSELDLQGIRIDSDISGTLKFACESIVEEYEDELIEFFSREADNVKDKLCSKRTDLCDHALHISHDEL

SEQ ID NO: 53 - DNA, 2397 bp, Homo sapiens
agaggtctggctggacgcagcctcctcctcctaggatgacctcaccctccagctctccagttttcaggttggagacattagatggaggccaagaagatggctctgaggcggacagaggaaagctggattttgggagcgggctgcctcccatggagtcacagttccagggcgaggaccggaaattcgcccctcagataagagtcaacctcaactaccgaaagggaacaggtgccagtcagccggatccaaaccgatttgaccgagatcggctcttcaatgcggtctcccggggtgtccccgaggatctggctggacttccagagtacctgagcaagaccagcaagtacctcaccgactcggaatacacagagggctccacaggtaagacgtgcctgatgaaggctgtgctgaaccttaaggacggagtcaatgcctgcattctgccactgctgcagatcgacagggactctggcaatcctcagcccctggtaaatgcccagtgcacagatgactattaccgaggccacagcgctctgcacatcgccattgagaagaggagtctgcagtgtgtgaagctcctggtggagaatggggccaatgtgcatgcccgggcctgcggccgcttcttccagaagggccaagggacttgcttttatttcggtgagctacccctctctttggccgcttgcaccaagcagtgggatgtggtaagctacctcctggagaacccacaccagcccgccagcctgcaggccactgactcccagggcaacacagtcctgcatgccctagtgatgatctcggacaactcagctgagaacattgcactggtgaccagcatgtatgatgggctcctccaagctggggcccgcctctgccctaccgtgcagcttgaggacatccgcaacctgcaggatctcacgcctctgaagctggccgccaaggagggcaagatcgagattttcaggcacatcctgcagcgggagttttcaggactgagccacctttcccgaaagttcaccgagtggtgctatgggcctgtccgggtgtcgctgtatgacctggcttctgtggacagctgtgaggagaactcagtgctggagatcattgcctttcattgcaagagcccgcaccgacaccgaatggtcgttttggagcccctgaacaaactgctgcaggcgaaatgggatctgctcatccccaagttcttcttaaacttcctgtgtaatctgatctacatgttcatcttcaccgctgttgcctaccatcagcctaccctgaagaagcaggccgcccctcacctgaaagcggaggttggaaactccatgctgctgacgggccacatccttatcctgctaggggggatctacctcctcgtgggccagctgtggtacttctggcggcgccacgtgttcatctggatctcgttcatagacagctactttgaaatcctcttcctgttccaggccctgctcacagtggtgtcccaggtgctgtgtttcctggccatcgagtggtacctgcccctgcttgtgtctgcgctggtgctgggctggctgaacctgctttactatacacgtggcttccagcacacaggcatctacagtgtcatgatccagaaggtcatcctgcgggacctgctgcgcttccttctgatctacttagtcttccttttcggcttcgctgtagccctggtgagcctgagccaggaggcttggcgccccgaagctcctacaggccccaatgccacagagtcagtgcagcccatggagggacaggaggacgagggcaacggggcccagtacaggggtatcctggaagcctccttggagctcttcaaattcaccatcggcatgggcgagctggccttccaggagcagctgcacttccgcggcatggtgctgctgctgctgctggcctacgtgctgctcacctacatcctgctgctcaacatgctcatcgccctcatgagcgagaccgtcaacagtgtcgccactgacagctggagcatctggaagctgcagaaagccatctctgtcctggagatggagaatggctattggtggtgcaggaagaagcagcgggcaggtgtgatgctgaccgttggcactaagccagatggcagccccgatgagcgctggtgcttcagggtggaggaggtgaactgggcttcatgggagcagacgctgcctacgctgtgtgaggacccgtcaggggcaggtgtccctcgaactctcgagaaccctgtcctggcttcccctcccaaggaggatgaggatggtgcctctgaggaaaactatgtgcccgtccagctcctccagtccaactgatggcccagatgcagcaggaggccagaggacagagcagaggatctttccaaccacatctgctggctct

SEQ ID NO: 54 - protein, 764 aa, Homo sapiens
MTSPSSSPVFRLETLDGGQEDGSEADRGKLDFGSGLPPMESQFQGEDRKFAPQIRVNLNYRKGTGASQPDPNRFDRDRLFNAVSRGVPEDLAGLPEYLSKTSKYLTDSEYTEGSTGKTCLMKAVLNLKDGVNACILPLLQIDRDSGNPQPLVNAQCTDDYYRGHSALHIAIEKRSLQCVKLLVENGANVHARACGRFFQKGQGTCFYFGELPLSLAACTKQWDVVSYLLENPHQPASLQATDSQGNTVLHALVMISDNSAENIALVTSMYDGLLQAGARLCPTVQLEDIRNLQDLTPLKLAAKEGKIEIFRHILQREFSGLSHLSRKFTEWCYGPVRVSLYDLASVDSCEENSVLEIIAFHCKSPHRHRMVVLEPLNKLLQAKWDLLIPKFFLNFLCNLIYMFIFTAVAYHQPTLKKQAAPHLKAEVGNSMLLTGHILILLGGIYLLVGQLWYFWRRHVFIWISFIDSYFEILFLFQALLTVVSQVLCFLAIEWYLPLLVSALVLGWLNLLYYTRGFQHTGIYSVMIQKVILRDLLRFLLIYLVFLFGFAVALVSLSQEAWRPEAPTGPNATESVQPMEGQEDEGNGAQYRGILEASLELFKFTIGMGELAFQEQLHFRGMVLLLLLAYVLLTYILLLNMLIALMSETVNSVATDSWSIWKLQKAISVLEMENGYWWCRKKQRAGVMLTVGTKPDGSPDERWCFRVEEVNWASWEQTLPTLCEDPSGAGVPRTLENPVLASPPKEDEDGASEENYVPVQLLQSN

SEQ ID NO: 55 - DNA, 2279 bp, Homo sapiens
tgcctgctgagggtggagacccacgagccgaggcctcctgcagtgttctgcacagcaaaccgcacgctatggctgacagccgggatcccgccagcgaccagatgcagcactggaaggagcagcgggccgcgcagaaagctgatgtcctgaccactggagctggtaacccagtaggagacaaacttaatgttattacagtagggccccgtgggccccttcttgttcaggatgtggttttcactgatgaaatggctcattttgaccgagagagaattcctgagagagttgtgcatgctaaaggagcaggggcctttggctactttgaggtcacacatgacattaccaaatactccaaggcaaaggtatttgagcatattggaaagaagactcccatcgcagttcggttctccactgttgctggagaatcgggttcagctgacacagttcgggaccctcgtgggtttgcagtgaaattttacacagaagatggtaactgggatctcgttggaaataacacccccattttcttcatcagggatcccatattgtttccatcttttatccacagccaaaagagaaatcctcagacacatctgaaggatccggacatggtctgggacttctggagcctacgtcctgagtctctgcatcaggtttctttcttgttcagtgatcgggggattccagatggacatcgccacatgaatggatatggatcacatactttcaagctggttaatgcaaatggggaggcagtttattgcaaattccattataagactgaccagggcatcaaaaacctttctgttgaagatgcggcgagactttcccaggaagatcctgactatggcatccgggatctttttaacgccattgccacaggaaagtacccctcctggactttttacatccaggtcatgacatttaatcaggcagaaacttttccatttaatccattcgatctcaccaaggtttggcctcacaaggactaccctctcatcccagttggtaaactggtcttaaaccggaatccagttaattactttgctgaggttgaacagatagccttcgacccaagcaacatgccacctggcattgaggccagtcctgacaaaatgcttcagggccgcctttttgcctatcctgacactcaccgccatcgcctgggacccaattatcttcatatacctgtgaactgtccctaccgtgctcgagtggccaactaccagcgtgatggcccgatgtgcatgcaggacaatcagggtggtgctccaaattactaccccaacagctttggtgctccggaacaacagccttctgccctggagcacagcatccaatattctggagaagtgcggagattcaacactgccaatgatgataacgttactcaggtgcgggcattctatgtgaacgtgctgaatgaggaacagaggaaacgtctgtgtgagaacattgccggccacctgaaggatgcacaaattttcatccagaagaaagcggtcaagaacttcactgaggtccaccctgactacgggagccacatccaggctcttctggacaagtacaatgctgagaagcctaagaatgcgattcacacctttgtgcagtccggatctcacttggcggcaagggagaaggcaaatctgtgaggccggggccctgcacctgtgcagcgaagcttagcgttcatccgtgtaacccgctcatcactggatgaagattctcctgtgctagatgtgcaaatgcaagctagtggcttcaaaatagagaatcccactttctatagcagattgtgtaacaattttaatgctatttccccaggggaaaatgaaggttaggatttaacagtcatttaaaaaaaaaatttgttttgacggatgattggattattcatttaaaatgattagaaggcaagtttctagctagaaatatgattttatttgacaaaatttgttgaaattatgtatgtttacatatcacctcatggcctattatattaaaatatggctataaatatataaaaagaaaagataaagatgatctactcagaaatttttatttttctaaggttctcataggaaaagtacatttaatacagcagtgtcatcagaagataacttgagcaccgtcatggcttaatgtttattcctgataataattgatcaaattcatttttttcactggagttacattaatgttaattcagcactgatttcacaacagatcaatttgtaattgcttacatttttacaataaataatctgtacgtaagaaca

SEQ ID NO: 56 - protein, 527 aa, Homo sapiens
MADSRDPASDQMQHWKEQRAAQKADVLTTGAGNPVGDKLNVITVGPRGPLLVQDVVFTDEMAHFDRERIPERVVHAKGAGAFGYFEVTHDITKYSKAKVFEHIGKKTPIAVRFSTVAGESGSADTVRDPRGFAVKFYTEDGNWDLVGNNTPIFFIRDPILFPSFIHSQKRNPQTHLKDPDMVWDFWSLRPESLHQVSFLFSDRGIPDGHRHMNGYGSHTFKLVNANGEAVYCKFHYKTDQGIKNLSVEDAARLSQEDPDYGIRDLFNAIATGKYPSWTFYIQVMTFNQAETFPFNPFDLTKVWPHKDYPLIPVGKLVLNRNPVNYFAEVEQIAFDPSNMPPGIEASPDKMLQGRLFAYPDTHRHRLGPNYLHIPVNCPYRARVANYQRDGPMCMQDNQGGAPNYYPNSFGAPEQQPSALEHSIQYSGEVRRFNTANDDNVTQVRAFYVNVLNEEQRKRLCENIAGHLKDAQIFIQKKAVKNFTEVHPDYGSHIQALLDKYNAEKPKNAIHTFVQSGSHLAAREKANL

SEQ ID NO: 57 - DNA, 2765 bp, Homo sapiens
gggctgcgactgacaagcggctctgcccgggaccttctcgctttcatctagcgctgcactcaatggaggggcgggcaccgcagtgcttaatgctgtcttaactagtgtaggaaaacggctcaacccaccgctgccgaaatgaagtataagaatcttatggcaagggccttatatgacaatgtcccagagtgtgccgaggaactggcctttcgcaagggagacatcctgaccgtcatagagcagaacacagggggactggaaggatggtggctgtgctcgttacacggtcggcaaggcattgtcccaggcaaccgggtgaagcttctgattggtcccatgcaggagactgcctccagtcacgagcagcctgcctctggactgatgcagcagacctttggccaacagaagctctatcaagtgccaaacccacaggctgctccccgagacaccatctaccaagtgccaccttcctaccaaaatcagggaatttaccaagtccccactggccacggcacccaagaacaagaggtatatcaggtgccaccatcagtgcagagaagcattgggggaaccagtgggccccacgtgggtaaaaaggtgataacccccgtgaggacaggccatggctacgtatacgagtacccatccagataccaaaaggatgtctatgatatccctccttctcataccactcaaggggtatacgacatccctccctcatcagcaaaaggccctgtgttttcagttccagtgggagagataaaacctcaaggggtgtatgacatcccgcctacaaaaggggtatatgccattccgccctctgcttgccgggatgaagcagggcttagggaaaaagactatgacttcccccctcccatgagacaagctggaaggccggacctcagaccggagggggtttatgacattcctccaacctgcaccaagccagcagggaaggaccttcatgtaaaatacaactgtgacattccaggagctgcagaaccggtggctcgaaggcaccagagcctgtccccgaatcacccacccccgcaactcggacagtcagtgggctctcagaacgacgcatatgatgtcccccgaggcgttcagtttcttgagccaccagcagaaaccagtgagaaagcaaacccccaggaaagggatggtgtttatgatgtccctctgcataacccgccagatgctaaaggctctcgggacttggtggatgggatcaaccgattgtctttctccagtacaggcagcacccggagtaacatgtccacgtcttccacctcctccaaggagtcctcactgtcagcctccccagctcaggacaaaaggctcttcctggatccagacacagctattgagagacttcagcggctccagcaggcccttgagatgggtgtctccagcctaatggcactggtcactaccgactggcggtgttacggatatatggaaagacacatcaatgaaatacgcacagcagtggacaaggtggagctgttcctgaaggagtacctccactttgtcaagggagctgttgcaaatgctgcctgcctcccggaactcatcctccacaacaagatgaagcgggagctgcaacgagtcgaagactcccaccagatcctgagtcaaaccagccatgacttaaatgagtgcagctggtccctgaatatcttggccatcaacaagccccagaacaagtgtgacgatctggaccggtttgtgatggtggcaaagacggtgcccgatgacgccaagcagctcaccacaaccatcaacaccaacgcagaggccctcttcagacccggccctggcagcttgcatctgaagaatgggccggagagcatcatgaactcaacggagtacccacacggtggctcccagggacagctgctgcatcctggtgaccacaaggcccaggcccacaacaaggcactgcccccaggcctgagcaaggagcaggcccctgactgtagcagcagtgatggttctgagaggagctggatggatgactacgattacgtccacctacagggtaaggaggagtttgagaggcaacagaaagagctattggaaaaagagaatatcatgaaacagaacaagatgcagctggaacatcatcagctgagccagttccagctgttggaacaagagattacaaagcccgtggagaatgacatctcgaagtggaagccctctcagagcctacccaccacaaacagtggcgtgagtgctcaggatcggcagttgctgtgcttctactatgaccaatgtgagacccatttcatttcccttctcaacgccattgacgcactcttcagttgtgtcagctcagcccagcccccgcgaatcttcgtggcacacagcaagtttgtcatcctcagtgcacacaaactggtgttcattggagacacgctgacacggcaggtgactgcccaggacattcgcaacaaagtcatgaactccagcaaccagctctgcgagcagctcaagactatagtcatggcaaccaagatggccgccctccattaccccagcaccacggccctgcaggaaatggtgcaccaagtgacagacctttctagaaatgcccagctgttcaagcgctctttgctggagatggcaacgttctgagaagaaaaaaaagaggaaggggactgcgttaacggttactaaggaaaactggaaatactgtctggtttttgtaaatgttatctatttttgtagatattttatataaaaatgaaatattttcc

SEQ ID NO: 58 - protein, 834 aa, Homo sapiens
MKYKNLMARALYDNVPECAEELAFRKGDILTVIEQNTGGLEGWWLCSLHGRQGIVPGNRVKLLIGPMQETASSHEQPASGLMQQTFGQQKLYQVPNPQAAPRDTIYQVPPSYQNQGIYQVPTGHGTQEQEVYQVPPSVQRSIGGTSGPHVGKKVITPVRTGHGYVYEYPSRYQKDVYDIPPSHTTQGVYDIPPSSAKGPVFSVPVGEIKPQGVYDIPPTKGVYAIPPSACRDEAGLREKDYDFPPPMRQAGRPDLRPEGVYDIPPTCTKPAGKDLHVKYNCDIPGAAEPVARRHQSLSPNHPPPQLGQSVGSQNDAYDVPRGVQFLEPPAETSEKANPQERDGVYDVPLHNPPDAKGSRDLVDGINRLSFSSTGSTRSNMSTSSTSSKESSLSASPAQDKRLFLDPDTAIERLQRLQQALEMGVSSLMALVTTDWRCYGYMERHINEIRTAVDKVELFLKEYLHFVKGAVANAACLPELILHNKMKRELQRVEDSHQILSQTSHDLNECSWSLNILAINKPQNKCDDLDRFVMVAKTVPDDAKQLTTTINTNAEALFRPGPGSLHLKNGPESIMNSTEYPHGGSQGQLLHPGDHKAQAHNKALPPGLSKEQAPDCSSSDGSERSWMDDYDYVHLQGKEEFERQQKELLEKENIMKQNKMQLEHHQLSQFQLLEQEITKPVENDISKWKPSQSLPTTNSGVSAQDRQLLCFYYDQCETHFISLLNAIDALFSCVSSAQPPRIFVAHSKFVILSAHKLVFIGDTLTRQVTAQDIRNKVMNSSNQLCEQLKTIVMATKMAALHYPSTTALQEMVHQVTDLSRNAQLFKRSLLEMATF

SEQ ID NO: 59 - DNA, 929 bp, Homo sapiens
gggcggcggcgcgcgggtgcgatcgcggagctgtgaggcgcaggcagggctctggggcacctagagaccggggccggagacgtggcagccgccctgcccgccagaaagtttcctagaagtttgctgggcgcgggcgcacgactgactggctggaccatgaacgtgttccgaatcctcggcgacctgagccacctcctggccatgatcttgctgctggggaagatctggaggtccaagtgctgcaagggcatctctgggaagagccagatcctgtttgctctcgtcttcaccaccaggtacctggacctgttcaccaacttcatctccatctacaacacagtaatgaaggtggtttttctcctctgtgcctatgttacagtgtacatgatatatgggaaattccgtaaaacttttgacagtgagaatgacacattccgcctggagtttcttctggtcccagtcattggcctttccttccttgaaaactacagtttcactctgctggagatcctctggactttctctatctatctggaatcagtggctatcctgccccagctcttcatgatcagcaagactggagaggctgagaccataactactcactacctgttctttctgggtctgtaccgggcactctacctggctaactggatcaggcggtaccagactgagaatttctatgaccaaattgcagtcgtgtctggagtagtacaaaccatcttctactgtgacttcttctacttgtatgtgaccaaaggtaggtcctgggatgacagcaatgctgacactggcctaaggagttactcatccatttaataagtattccagcagatacagatgtgaacagtcaagtctctgccatccacaatgcttgtgttctaatgcaagaagacaaatattttcaataaagaaacaaatgccataaa

SEQ ID NO: 60 - protein, 220 aa, Homo sapiens
MNVFRILGDLSHLLAMILLLGKIWRSKCCKGISGKSQILFALVFTTRYLDLFTNFISIYNTVMKVVFLLCAYVTVYMIYGKFRKTFDSENDTFRLEFLLVPVIGLSFLENYSFTLLEILWTFSIYLESVAILPQLFMISKTGEAETITTHYLFFLGLYRALYLANWIRRYQTENFYDQIAVVSGVVQTIFYCDFFYLYVTKGRSWDDSNADTGLRSYSSI

SEQ ID NO: 61 - DNA, 8509 bp, Homo sapiens
cgccctcgagtggaggacgagaaggaaagcaccatgacgtccatccatttcgtggttcacccgctgccgggcaccgaggaccagctcaatgacaggttacgagaagtttctgagaagctgaacaaatataatttaaacagccacccccctttgaatgtattggaacaggctactattaaacagtgtgtggtgggaccaaatcatgctgcctttcttcttgaggatggtagagtttgcaggattggtttttcagtacagccagacagattggaattgggtaaacctgataataatgatgggtcaaagttgaacagcaactcgggggcagggaggacgtcaaggcctggtaggacaagcgactctccatggtttctctcaggttctgagactctaggcaggctggcaggcaacaccttaggaagccgctggagttctggagtgggtggaagtggtggaggatcctctggtaggtcatcagctggagctcgagattcccgccggcagactcgagttattcggacaggacgggatcgagggtctgggcttttgggcagtcagccccagccagttattccagcatctgtcattccagaggagctgatttcacaggcccaagttgttttacaaggcaaatccagaagtgtcattattcgagaacttcagagaacaaatcttgatgtgaaccttgctgtaaataatttacttagccgggatgatgaagatggagatgatggggatgatacagccagcgaatcttatttgcctggagaggatcttatgtctctccttgatgccgacattcattctgcccacccaagtgtcattattgatgcagatgccatgttttctgaagacattagctattttggttacccttcttttcgtcgttcatcactttccaggctaggctcatctcgagttctccttcttcccttagagagagactctgagctgttgcgtgaacgtgaatccgttttacgtttacgtgaacgaaggtggcttgatggagcctcatttgataatgaaaggggttctaccagcaaggaaggagagccaaacttggataagaagaatacacctgttcaaagtccagtatctctaggagaagatttgcagtggtggcctgataaggatggaacaaaattcatctgtattggggctctgtattctgaacttctggctgtcagcagtaaaggagaactttatcagtggaaatggagtgaatctgagccttacagaaatgcccagaatccttcattacatcatccacgagcaacatttttggggttaaccaatgaaaagatagtcctcctgtctgcaaatagcataagagcaactgtagctacagaaaataacaaggttgctacatgggtggatgaaactttaagttctgtggcttctaaattagagcacactgctcagacttactctgaacttcaaggagagcggatagtttctttacattgctgtgccctttacacctgcgctcagctggaaaacagtttatattggtggggtgtagttccttttagtcaaaggaagaaaatgttagagaaagctagagcaaaaaataaaaagcctaaatccagtgctggtatttcttcaatgccgaacatcactgttggtacccaggtatgcttgagaaataatcctctttatcatgctggagcagttgcattttcaattagtgctgggattcctaaagttggtgtcttaatggagtcagtttggaatatgaatgacagctgtagatttcaacttagatctcctgaaagcttgaaaaacatggaaaaagctagcaaaactactgaagctaagcctgaaagtaagcaggagccagtgaaaacagaaatgggtcctccaccatctccagcatccacgtgtagtgatgcatcctcaattgccagcagtgcatcaatgccatacaaacgacgacggtcaacccctgcaccaaaagaagaggaaaaggtgaatgaagagcagtggtctcttcgggaagtggtttttgtggaagatgtcaagaatgttcctgttggcaaggtgctaaaagtagatggtgcctatgttgctgtaaaatttccaggaacctccagtaatactaactgtcagaacagctctggtccagatgctgacccttcttctctcctgcaggattgtaggttacttagaattgatgaattgcaggttgtcaaaactggtggaacaccgaaggttcccgactgtttccaaaggactcctaaaaagctttgtatacctgaaaaaacagaaatattagcagtgaatgtagattccaaaggtgttcatgctgttctgaagactggaaattgggtgcgatactgtatctttgatcttgctacaggaaaagcagaacaggaaaataattttcctacaagcagcattgctttccttggtcagaatgagaggaatgtagccattttcactgctggacaggaatctcccattattcttcgagatggaaatggtaccatctacccaatggccaaagattgcatgggaggaataagggatcccgattggctggatcttccacctattagtagtcttggaatgggtgtgcattctttaataaatcttcctgccaattcaacaatcaaaaagaaagctgctgttatcatcatggctgtagagaaacaaaccttaatgcaacacattctgcgctgtgactatgaggcctgtcgacaatatctaatgaatcttgagcaagcggttgttttagagcagaatctacagatgctgcagacattcatcagccacagatgtgatggaaatcgaaatattttgcatgcttgtgtatcagtttgctttccaaccagcaataaagaaactaaagaagaagaggaagcggagcgttctgaaagaaatacatttgcagaaaggctttctgctgttgaggccattgcaaatgcaatatcagttgtttcaagtaatggcccaggtaatcgggctggatcatcaagtagccgaagtttgagattacgggaaatgatgagacgttcgttgagagcagctggtttgggtagacatgaagctggagcttcatccagtgaccaccaggatccagtttcaccccccatagctccccctagttgggttcctgaccctcctgcgatggatcctgatggtgacattgattttatcctggcccccgctgtgggatctcttaccacagcagcaaccggtactggtcaaggaccaagcacctccactattccaggtccttccacagagccatctgtagtagaatccaaggatcgaaaggcgaatgctcattttatattgaaattgttatgtgacagtgtggttctccagccctatctacgagaacttctttctgccaaggatgcaagagggatgaccccatttatgtcagctgtaagtggccgagcttatcctgctgcaattaccatcttagaaactgctcagaaaattgcaaaagctgaaatatcctcaagtgaaaaagaggaagatgtattcatgggaatggtttgcccatcaggtaccaaccctgatgactctcctttatatgttttatgttgtaatgacacttgcagttttacatggactggagcagagcacattaaccaggatatttttgagtgtcgaacttgtggcttgctggagtcactgtgttgttgtacggaatgtgcaagggtttgtcataaaggtcatgattgcaaactcaaacggacatcaccaacagcctactgtgattgttgggagaaatgtaaatgtaaaactcttattgctggacagaaatctgctcgtcttgatctactttatcgcctgctcactgctactaatctggttactctgccaaacagcaggggagagcacctcttactattcttagtacagacagtcgcaaggcagacggtggagcattgtcaatacaggccacctcgaatcagggaagatcgtaaccgaaaaacagccagtcctgaagattcagatatgccagatcatgatttagagcctccaagatttgcccagcttgcattggagcgtgttctacaggactggaatgccttgaaatctatgattatgtttgggtcgcaggagaataaagaccctcttagtgccagcagtagaataggccatcttttgccagaagagcaagtatacctcaatcagcaaagtggcacaattcggctggactgtttcactcattgccttatagttaagtgtacagcagatattttgcttttagatactctactaggtacactagtgaaagaactccaaaacaaatatacacctggacgtagagaagaagctattgctgtgacaatgaggtttctacgttcagtggcaagagtttttgttattctgagtgtggaaatggcttcatccaaaaagaaaaacaactttattccacagccaattggaaaatgcaagcgtgtattccaagcattgctaccttacgctgtggaagaattgtgcaacgtagcagagtcactgattgttcctgtcagaatggggattgctcgtccaactgcaccatttaccctggctagtactagcatagatgccatgcagggcagtgaagaattattttcagtggaaccactaccaccacgaccatcatctgatcagtctagcagctccagtcagtctcagtcatcctacatcatcaggaatccacagcagaggcgcatcagccagtcacagcccgttcggggcagagatgaagaacaggatgatattgtttcagcagatgtggaagaggttgaggtggtggagggtgtggctggagaagaggatcatcatgatgaacaggaagaacacggggaagaaaatgctgaggcagagggacaacatgatgagcatgatgaagacgggagtgatatggagctggacttgttagcagcagctgaaacagaaagtgatagtgaaagtaaccacagcaaccaagataatgctagtgggcgcagaagcgttgtcactgcagcaactgctggttcagaagcaggagcaagcagtgttcctgccttcttttctgaagatgattctcaatcgaatgactcaagtgattctgatagcagtagtagtcagagtgacgacatagaacaggagacctttatgcttgatgagccattagaaagaaccacaaatagctcccatgccaatggtgctgcccaagctccccgttcaatgcagtgggctgtccgcaacacccagcatcagcgagcagccagtacagccccttccagtacatctacaccagcagcaagttcagcgggtttgatttatattgatccttcaaacttacgccggagtggtaccatcagtacaagtgctgcagctgcagcagctgctttggaagctagcaacgccagcagttacctaacatctgcaagcagtttagccagggcttacagcattgtcattagacaaatctcggacttgatgggccttattcctaagtataatcacctagtatactctcagattccagcagctgtgaaattgacttaccaagatgcagtaaacttacagaactatgtagaagaaaagcttattcccacttggaactggatggtcagtattatggattctactgaagctcaattacgttatggttctgcattagcatctgctggtgatcctggacatccaaatcatcctcttcacgcttctcagaattcagcgagaagagagaggatgactgcgcgagaagaagctagcttacgaacacttgaaggcagacgacgtgccaccttgcttagcgcccgtcaaggaatgatgtctgcacgaggagacttcctaaattatgctctgtctctaatgcggtctcataatgatgagcattctgatgttcttccagttttggatgtttgctcattgaagcatgtggcatatgtttttcaagcacttatatactggattaaggcaatgaatcagcagacaacattggatacacctcaactagaacgcaaaaggacgcgagaactcttggaactgggtattgataatgaagattcagaacatgaaaatgatgatgacaccaatcaaagtgctactttgaatgataaggatgatgactctcttcctgcagaaactggccaaaaccatccatttttccgacgttcagactccatgacattccttgggtgtatacccccaaatccatttgaagtgcctctggctgaagccatccccttggctgatcagccacatctgttgcagccaaatgctagaaaggaggatctttttggccgtccaagtcagggtctttattcttcatctgccagtagtgggaaatgtttaatggaggttacagtggatagaaactgcctagaggttcttccaacaaaaatgtcttatgctgccaatctgaaaaatgtaatgaacatgcaaaaccggcaaaaaaaagaaggggaagaacagcccgtgctgccagaagaaactgagagttcaaaaccagggccatctgctcatgatcttgctgcacaattaaaaagtagcttactagcagaaataggacttactgaaagtgaagggccacctctcacatctttcaggccacagtgtagctttatgggaatggttatttcccatgatatgctgctaggacgttggcgcctttctttagaactgttcggcagggtattcatggaagatgttggagcagaacctggatcaatcctaactgaattgggtggttttgaggtaaaagaatcaaaattccgcagagaaatggaaaaactgagaaaccagcagtcaagagatttgtcactagaggttgatcgggatcgagatcttctcattcagcagactatgaggcagcttaacaatcactttggtcgaagatgtgctactacaccaatggctgtacacagagtaaaagtcacatttaaggatgagccaggagagggcagtggtgtagcacgaagtttttatacagccattgcacaagcatttttatcaaatgaaaaattgccaaatctagagtgtatccaaaatgccaacaaaggcacccacacaagtttaatgcagagattaaggaaccgaggagagagagaccgggaaagggagagagaaagggaaatgaggaggagtagtggtttgcgagcaggttctcggagggaccgggatagagactttagaagacagctttccatcgacactaggccctttagaccagcctctgaagggaatcctagcgatgatcctgagcctttgccagcacatcggcaggcacttggagagaggctttatcctcgtgtacaagcaatgcaaccagcatttgcaagtaaaatcactggcatgttgttggaattatccccagctcagctgcttctccttctagcaagtgaggattctctgagagcaagagtggatgaggccatggaactcattattgcacatggacgggaaaatggagctgatagtatcctggatcttggattagtagactcctcagaaaaggtacagcaggaaaaccgaaagcgccatggctctagtcgaagtgtagtagatatggatttagatgatacagatgatggtgatgacaatgcccctttgttttaccaacctgggaaaagaggattttatactccaaggcctggcaagaacacagaagcaaggttgaattgtttcagaaacattggcaggattcttggactatgtctgttacagaatgaactctgtcctatcacattgaatagacatgtaattaaagtattgcttggtagaaaagtcaattggcatgattttgctttttttgatcctgtaatgtatgagagtttgcggcaactaatcctcgcgtctcagagttcagatgctgatgctgttttctcagcaatggatttggcatttgcaattgacctgtgtaaagaagaaggtggaggacaggttgaactcattcctaatggtgtaaatataccagtcactccacagaatgtatatgagtatgtgcggaaatacgcagaacacagaatgttggtagttgcagaacagcccttacatgcaatgaggaaaggtctactagatgtgcttccaaaaaattcattagaagatttaacggcagaagattttaggcttttggtaaatggctgcggtgaagtcaatgtgcaaatgctgatcagttttacctctttcaatgatgaatcaggagaaaatgctgagaagcttctgcagttcaagcgttggttctggtcaatagtagagaagatgagcatgacagaacgacaagatcttgtttacttttggacatcaagcccatcactgccagccagtgaagaaggattccagcctatgccctcaatcacaataagaccaccagatgaccaacatcttcctactgcaaatacttgcatttctcgactttacgtcccactctattcctctaaacagattctcaaacagaaattgttactcgccattaagaccaagaattttggttttgtgtagagtataaaaagtgtgtattgctgtgtaatattactagcaaattttgtagatttttttccatttgtctataaaagtt

SEQ ID NO: 62 - protein, 2799 aa, Homo sapiens
MTSIHFVVHPLPGTEDQLNDRLREVSEKLNKYNLNSHPPLNVLEQATIKQCVVGPNHAAFLLEDGRVCRIGFSVQPDRLELGKPDNNDGSKLNSNSGAGRTSRPGRTSDSPWFLSGSETLGRLAGNTLGSRWSSGVGGSGGGSSGRSSAGARDSRRQTRVIRTGRDRGSGLLGSQPQPVIPASVIPEELISQAQVVLQGKSRSVIIRELQRTNLDVNLAVNNLLSRDDEDGDDGDDTASESYLPGEDLMSLLDADIHSAHPSVIIDADAMFSEDISYFGYPSFRRSSLSRLGSSRVLLLPLERDSELLRERESVLRLRERRWLDGASFDNERGSTSKEGEPNLDKKNTPVQSPVSLGEDLQWWPDKDGTKFICIGALYSELLAVSSKGELYQWKWSESEPYRNAQNPSLHHPRATFLGLTNEKIVLLSANSIRATVATENNKVATWVDETLSSVASKLEHTAQTYSELQGERIVSLHCCALYTCAQLENSLYWWGVVPFSQRKKMLEKARAKNKKPKSSAGISSMPNITVGTQVCLRNNPLYHAGAVAFSISAGIPKVGVLMESVWNMNDSCRFQLRSPESLKNMEKASKTTEAKPESKQEPVKTEMGPPPSPASTCSDASSIASSASMPYKRRRSTPAPKEEEKVNEEQWSLREVVFVEDVKNVPVGKVLKVDGAYVAVKFPGTSSNTNCQNSSGPDADPSSLLQDCRLLRIDELQVVKTGGTPKVPDCFQRTPKKLCIPEKTEILAVNVDSKGVHAVLKTGNWVRYCIFDLATGKAEQENNFPTSSIAFLGQNERNVAIFTAGQESPIILRDGNGTIYPMAKDCMGGIRDPDWLDLPPISSLGMGVHSLINLPANSTIKKKAAVIIMAVEKQTLMQHILRCDYEACRQYLMNLEQAVVLEQNLQMLQTFISHRCDGNRNILHACVSVCFPTSNKETKEEEEAERSERNTFAERLSAVEAIANAISVVSSNGPGNRAGSSSSRSLRLREMMRRSLRAAGLGRHEAGASSSDHQDPVSPPIAPPSWVPDPPAMDPDGDIDFILAPAVGSLTTAATGTGQGPSTSTIPGPSTEPSVVESKDRKANAHFILKLLCDSVVLQPYLRELLSAKDARGMTPFMSAVSGRAYPAAITILETAQKIAKAEISSSEKEEDVFMGMVCPSGTNPDDSPLYVLCCNDTCSFTWTGAEHINQDIFECRTCGLLESLCCCTECARVCHKGHDCKLKRTSPTAYCDCWEKCKCKTLIAGQKSARLDLLYRLLTATNLVTLPNSRGEHLLLFLVQTVARQTVEHCQYRPPRIREDRNRKTASPEDSDMPDHDLEPPRFAQLALERVLQDWNALKSMIMFGSQENKDPLSASSRIGHLLPEEQVYLNQQSGTIRLDCFTHCLIVKCTADILLLDTLLGTLVKELQNKYTPGRREEAIAVTMRFLRSVARVFVILSVEMASSKKKNNFIPQPIGKCKRVFQALLPYAVEELCNVAESLIVPVRMGIARPTAPFTLASTSIDAMQGSEELFSVEPLPPRPSSDQSSSSSQSQSSYIIRNPQQRRISQSQPVRGRDEEQDDIVSADVEEVEVVEGVAGEEDHHDEQEEHGEENAEAEGQHDEHDEDGSDMELDLLAAAETESDSESNHSNQDNASGRRSVVTAATAGSEAGASSVPAFFSEDDSQSNDSSDSDSSSSQSDDIEQETFMLDEPLERTTNSSHANGAAQAPRSMQWAVRNTQHQRAASTAPSSTSTPAASSAGLIYIDPSNLRRSGTISTSAAAAAAALEASNASSYLTSASSLARAYSIVIRQISDLMGLIPKYNHLVYSQIPAAVKLTYQDAVNLQNYVEEKLIPTWNWMVSIMDSTEAQLRYGSALASAGDPGHPNHPLHASQNSARRERMTAREEASLRTLEGRRRATLLSARQGMMSARGDFLNYALSLMRSHNDEHSDVLPVLDVCSLKHVAYVFQALIYWIKAMNQQTTLDTPQLERKRTRELLELGIDNEDSEHENDDDTNQSATLNDKDDDSLPAETGQNHPFFRRSDSMTFLGCIPPNPFEVPLAEAIPLADQPHLLQPNARKEDLFGRPSQGLYSSSASSGKCLMEVTVDRNCLEVLPTKMSYAANLKNVMNMQNRQKKEGEEQPVLPEETESSKPGPSAHDLAAQLKSSLLAEIGLTESEGPPLTSFRPQCSFMGMVISHDMLLGRWRLSLELFGRVFMEDVGAEPGSILTELGGFEVKESKFRREMEKLRNQQSRDLSLEVDRDRDLLIQQTMRQLNNHFGRRCATTPMAVHRVKVTFKDEPGEGSGVARSFYTAIAQAFLSNEKLPNLECIQNANKGTHTSLMQRLRNRGERDREREREREMRRSSGLRAGSRRDRDRDFRRQLSIDTRPFRPASEGNPSDDPEPLPAHRQALGERLYPRVQAMQPAFASKITGMLLELSPAQLLLLLASEDSLRARVDEAMELIIAHGRENGADSILDLGLVDSSEKVQQENRKRHGSSRSVVDMDLDDTDDGDDNAPLFYQPGKRGFYTPRPGKNTEARLNCFRNIGRILGLCLLQNELCPITLNRHVIKVLLGRKVNWHDFAFFDPVMYESLRQLILASQSSDADAVFSAMDLAFAIDLCKEEGGGQVELIPNGVNIPVTPQNVYEYVRKYAEHRMLVVAEQPLHAMRKGLLDVLPKNSLEDLTAEDFRLLVNGCGEVNVQMLISFTSFNDESGENAEKLLQFKRWFWSIVEKMSMTERQDLVYFWTSSPSLPASEEGFQPMPSITIRPPDDQHLPTANTCISRLYVPLYSSKQILKQKLLLAIKTKNFGFV

SEQ ID NO: 63 - DNA, 320 bp, Homo sapiens
tatagttagcattttaataaaccagagaaaaatcggagacagttttacaatcgcttcatgtcaactacaatggcactgaatgaacaggtttcagctttatacagcattttgcaacatcaacatgcctaggttttttttatttttaaagtctgctgcctactcgtatgtaatatgtgtacataaaagcggcacgtggtttttcgtttaagagtaatctaatatacagaattttggcacgtaaagttttgtacacggtcagtccgggtcctaagggcgcagggtagggcatcccactgggagttcaaaggggaaacgaagat

SEQ ID NO: 64 - protein, 596 aa, Homo sapiens
MPQLNGGGGDDLGANDELISFKDEGEQEEKSSENSSAERDLADVKSSLVNESETNQNSSSDSEAERRPPPRSESFRDKSRESLEEAAKRQDGGLFKGPPYPGYPFIMIPDLTSPYLPNGSLSPTARTYLQMKWPLLDVQAGSLQSRQALKDARSPSPAHIVSNKVPVVQHPHHVHPLTPLITYSNEHFTPGNPPPHLPADVDPKTGIPRPPHPPDISPYYPLSPGTVGQIPHPLGWLVPQQGQPVYPITTGGFRHPYPTALTVNASVSRFPPHMVPPHHTLHTTGIPHPAIVTPTVKQESSQSDVGSLHSSKHQDSKKEEEKKKPHIKKPLNAFMLYMKEMRAKVVAECTLKESAAINQILGRRWHALSREEQAKYYELARKERQLHMQLYPGWSARDNYGKKKKRKRDKQPGETNEHSECFLNPCLSLPPITDLSAPKKCRARFGLDQQNNWCGPCRRKKKCVRYIQGEGSCLSPPSSDGSLLDSPPPSPNLLGSPPRDAKSQTEQTQPLSLSLKPDPLAHLSMMPPPPALLLAEATHKASALCPNGALDLPPAALQPAAPSSSIAQPSTSWLHSHSSLAGTQPQPLSLVTKSLE

SEQ ID NO: 65 - DNA, 547 bp, Homo sapiens
  misc_feature (477)..(477): n is a, c, g, or t
tttttttttttttttttttttttttttttttttaagggaagcaaaactttattcctcttggctggagaagaaaactagggggtggttgggtacaggacccccatccctcacccctcccagaaccaaagaagacaagcagcgccaccaaatggctccctctgcccaagtgaaagccgagaggtcagcggctggctggggaggcaggtgagcccaacacggcacagggcaggggcggctgcagtgacaggcgggcggccagggcggcctgggccggggttgaggggaaaagggcggggctgcttgggtagcggggcaggcttgggggctgccggctggcacgggccccagactcagggcaccacaacgcggtaggggctgccttggatgtgctcgtccccccatttgaccaccagtgtgtactcccccttgtccttgagcaggtaggacacgctgtagagccggctgcccacgtgcttnaccaggatcttctcgcaggggtccttgggccatgaacccccaccagcagcatgtgttgcctgctttgctg

SEQ ID NO: 66 - protein, 2647 aa, Homo sapiens
MSSSHSRAGQSAAGAAPGGGVDTRDAEMPATEKDLAEDAPWKKIQQNTFTRWCNEHLKCVSKRIANLQTDLSDGLRLIALLEVLSQKKMHRKHNQRPTFRQMQLENVSVALEFLDRESIKLVSIDSKAIVDGNLKLILGLIWTLILHYSISMPMWDEEEDEEAKKQTPKQRLLGWIQNKLPQLPITNFSRDWQSGRALGALVDSCAPGLCPDWDSWDASKPVTNAREAMQQADDWLGIPQVITPEEIVDPNVDEHSVMTYLSQFPKAKLKPGAPLRPKLNPKKARAYGPGIEPTGNMVKKRAEFTVETRSAGQGEVLVYVEDPAGHQEEAKVTANNDKNRTFSVWYVPEVTGTHKVTVLFAGQHIAKSPFEVYVDKSQGDASKVTAQGPGLEPSGNIANKTTYFEIFTAGAGTGEVEVVIQDPMGQKGTVEPQLEARGDSTYRCSYQPTMEGVHTVHVTFAGVPIPRSPYTVTVGQACNPSACRAVGRGLQPKGVRVKETADFKVYTKGAGSGELKVTVKGPKGEERVKQKDLGDGVYGFEYYPMVPGTYIVTITWGGQNIGRSPFEVKVGTECGNQKVRAWGPGLEGGVVGKSADFVVEAIGDDVGTLGFSVEGPSQAKIECDDKGDGSCDVRYWPQEAGEYAVHVLCNSEDIRLSPFMADIRDAPQDFHPDRVKARGPGLEKTGVAVNKPAEFTVDAKHGGKAPLRVQVQDNEGCPVEALVKDNGNGTYSCSYVPRKPVKHTAMVSWGGVSIPNSPFRVNVGAGSHPNKVKVYGPGVAKTGLKAHEPTYFTVDCAEAGQGDVSIGIKCAPGVVGPAEADIDFDIIRNDNDTFTVKYTPRGAGSYTIMVLFADQATPTSPIRVKVEPSHDASKVKAEGPGLSRTGVELGKPTHFTVNAKAAGKGKLDVQFSGLTKGDAVRDVDIIDHHDNTYTVKYTPVQQGPVGVNVTYGGDPIPKSPFSVAVSPSLDLSKIKVSGLGEKVDVGKDQEFTVKSKGAGGQGKVASKIVGPSGAAVPCKVEPGLGADNSVVRFLPREEGPYEVEVTYDGVPVPGSPFPLEAVAPTKPSKVKAFGPGLQGGSAGSPARFTIDTKGAGTGGLGLTVEGPCEAQLECLDNGDGTCSVSYVPTEPGDYNINILFADTHIPGSPFKAHVVPCFDASKVKCSGPGLERATAGEVGQFQVDCSSAGSAELTIEICSEAGLPAEVYIQDHGDGTHTITYIPLCPGAYTVTIKYGGQPVPNFPSKLQVEPAVDTSGVQCYGPGIEGQGVFREATTEFSVDARALTQTGGPHVKARVANPSGNLTETYVQDRGDGMYKVEYTPYEEGLHSVDVTYDGSPVPSSPFQVPVTEGCDPSRVRVHGPGIQSGTTNKPNKFTVETRGAGTGGLGLAVEGPSEAKMSCMDNKDGSCSVEYIPYEAGTYSLNVTYGGHQVPGSPFKVPVHDVTDASKVKCSGPGLSPGMVRANLPQSFQVDTSKAGVAPLQVKVQGPKGLVEPVDVVDNADGTQTVNYVPSREGPYSISVLYGDEEVPRSPFKVKVLPTHDASKVKASGPGLNTTGVPASLPVEFTIDAKDAGEGLLAVQITDPEGKPKKTHIQDNHDGTYTVAYVPDVTGRYTILIKYGGDEIPFSPYRVRAVPTGDASKCTVTVSIGGHGLGAGIGPTIQIGEETVITVDTKAAGKGKVTCTVCTPDGSEVDVDVVENEDGTFDIFYTAPQPGKYVICVRFGGEHVPNSPFQVTALAGDQPSVQPPLRSQQLAPQYTYAQGGQQTWAPERPLVGVNGLDVTSLRPFDLVIPFTIKKGEITGEVRMPSGKVAQPTITDNKDGTVTVRYAPSEAGLHEMDIRYDNMHIPGSPLQFYVDYVNCGHVTAYGPGLTHGVVNKPATFTVNTKDAGEGGLSLAIEGPSKAEISCTDNQDGTCSVSYLPVLPGDYSILVKYNEQHVPGSPFTARVTGDDSMRMSHLKVGSAADIPINISETDLSLLTATVVPPSGREEPCLLKRLRNGHVGISFVPKETGEHLVHVKKNGQHVASSPIPVVISQSEIGDASRVRVSGQGLHEGHTFEPAEFIIDTRDAGYGGLSLSIEGPSKVDINTEDLEDGTCRVTYCPTEPGNYIINIKFADQHVPGSPFSVKVTGEGRVKESITRRRRAPSVANVGSHCDLSLKIPEISIQDMTAQVTSPSGKTHEAEIVEGENHTYCIRFVPAEMGTHTVSVKYKGQHVPGSPFQFTVGPLGEGGAHKVRAGGPGLERAEAGVPAEFSIWTREAGAGGLAIAVEGPSKAEISFEDRKDGSCGVAYVVQEPGDYEVSVKFNEEHIPDSPFVVPVASPSGDARRLTVSSLQESGLKVNQPASFAVSLNGAKGAIDAKVHSPSGALEECYVTEIDQDKYAVRFIPRENGVYLIDVKFNGTHIPGSPFKIRVGEPGHGGDPGLVSAYGAGLEGGVTGNPAEFVVNTSNAGAGALSVTIDGPSKVKMDCQECPEGYRVTYTPMAPGSYLISIKYGGPYHIGGSPFKAKVTGPRLVSNHSLHETSSVFVDSLTKATCAPQHGAPGPGPADASKVVAKGLGLSKAYVGQKSSFTVDCSKAGNNMLLVGVHGPRTPCEEILVKHVGSRLYSVSYLLKDKGEYTLVVKWGHEHIPGSPYRVVVP

SEQ ID NO: 67 - DNA, 937 bp, Homo sapiens
aaaacataactttaggtattctaatgtatttgttagttgcttagaaatggaaataaaatatatgtgcttattaaataatgcacagtacactagattatagagtttatttttgcttttatgctttaaagaatgcatgcccaaaacactactaccaacaggaggattttttaaaatcacagaattgatatttatctcaagactatcttaagctaatgtacttctgttacataattaaactatttctgctattatttttaaagcagtattattttataaccaattctaaaattcagctttaaaaatattgaacataccttcctaccacttacgcttcaagtttcatttattgaataccaggtcatatcttagaattgtatataaaacaacatgtaacccattcatgaaaaacgtttttaagtattgctttttgctgctatgttctgcattgagcctagttttgccattgtcccctgaatgtagtattatctatagattatacataactacatctattgctttggtggtaaatcaagatttagttgtaattttccagctgtgaaaatgttgccttgtatttaaaaagggtttcatgaatggaaacctaagtaaaactaagctcattagtgacagacttgttttcttcttgttattctccagaactccctcacacacgcctcctgctacatccggagggtgcttatacttaacaaggagaatctcaaaaaaaaaaaagggggcggcaaatttcctgaggggccaaggtacgtacccgtttgtaagggccttaaggaggttaaagtaggatggccggttacactccgcggactgtatgagttggaggacctcttggggcaatgcaccacgataagcgcatattgtggtaactttctgattggttataaagaaataaaagctgcagaaaaagctagacatagcc

SEQ ID NO: 68 - protein, 512 aa, Homo sapiens
MMLSEQAQKWFPTHVQVTVLQAKDLKPKGKSGTNDTYTIIQLGKEKYSTSVAEKTLEPVWKEEASFELPGLLIQGSPEKYILFLIVMHRSLVGLDKFLGQVAINLNDIFEDKQRRKTEWFRLESKQGKRIKNRGEIKVNIQFMRNNMTASMFDLSMKDKTRSPFAKLKDKMKGRKNDGTFSDTSSAIIPSTHMPDANSEFSSGEIQMKSKPKKPFLLGPQRLSSAHSMSDLSGSHMSSEKLKAGTIGQTHLLGHQLDSFGTVPESGSLKSPHRRTLSFDTSKMNQPDSIVDEGELCFGRQNDPFTNVTASLPQKFATLPRKKNPFEESSETWDSSMNLFSKPIEIRKENKREKREKVSLFERVTGKKDSRRSDKLNNGGSDSPCDLKSPNAFSENRQDYFDYESTNPFTAKFRASNIMPSSSFHMSPTSNEDLRKIPDSNPFDATAGYRSLTYEEVLQELVKHKELLRRKDTHIRELEDYIDNLLVRVMEETPSILRVPYEPSRKAGKFSNS

SEQ ID NO: 69 - DNA, 1173 bp, Homo sapiens
gtgtctcagccacagcggcttcaccatgcacagctgggagcgcctggcagttctggtcctcctaggagcggccgcctgcgcggcgccgccccgtggtcggatcctgggcggcagagaggccgaggcgcacgcgcggccctacatggcgtcggtgcagctgaacggcgcgcacctgtgcggcggcgtcctggtggcggagcagtgggtgctgagcgcggcgcactgcctggaggacgcggccgacgggaaggtgcaggttctcctgggcgcgcactccctgtcgcagccggagccctccaagcgcctgtacgacgtgctccgcgcagtgccccacccggacagccagcccgacaccatcgaccacgacctcctgctgctacagctgtcggagaaggccacactgggccctgctgtgcgccccctgccctggcagcgcgtggaccgcgacgtggcaccgggaactctctgcgacgtggccggctggggcatagtcaaccacgcgggccgccgcccggacagcctgcagcacgtgctcttgccagtgctggaccgcgccacctgcaaccggcgcacgcaccacgacggcgccatcaccgagcgcttgatgtgcgcggagagcaatcgccgggacagctgcaagggtgactccgggggcccgctggtgtgcgggggcgtgctcgagggcgtggtcacctcgggctcgcgcgtttgcggcaaccgcaagaagcccgggatctacacccgcgtggcgagctatgcggcctggatcgacagcgtcctggcctagggtgccggggcctgaaggtcagggtcacccaagcaacaaagtcccgagcaatgaagtcatccactcctgcatctggttggtctttattgagcacctactatatgcagaaggggaggccgaggtgggaggatcattggatctcaggagttcgagatcagcatgggccacgtagcgcgactccatctctacaaataaataaaaaattagctgggcaattggcgggcatggaggtgggtgcttgtagttccagctactcaggaggctgaggtgggaggatgacttgaacgcaggaggctgaggctgcagtgagttgtgattgcaccactgccctccagcctgggcaacagagtgaaaccttgtctctctctacaaaaaaaaaaaaaaaa

SEQ ID NO: 70 - protein, 253 aa, Homo sapiens
MHSWERLAVLVLLGAAACAAPPRGRILGGREAEAHARPYMASVQLNGAHLCGGVLVAEQWVLSAAHCLEDAADGKVQVLLGAHSLSQPEPSKRLYDVLRAVPHPDSQPDTIDHDLLLLQLSEKATLGPAVRPLPWQRVDRDVAPGTLCDVAGWGIVNHAGRRPDSLQHVLLPVLDRATCNRRTHHDGAITERLMCAESNRRDSCKGDSGGPLVCGGVLEGVVTSGSRVCGNRKKPGIYTRVASYAAWIDSVLA

SEQ ID NO: 71 - DNA, 5807 bp, Homo sapiens
gcgcgcgcgagggcgttgggcgccgccgcgaggcggggaagcgcggggccgcggcggtgcgggttctagggcggcggccgtcgccgtcgcagcagcgccccgagcggggagggccgaggaggcccgacgagctggggatggagagtaccgggcccctcactgcctcagagcgcgtgtgcggctctgggcgcgcacagtgacggtgacggcacccctggcccggcagcgccgaggccgcttcgccagacagccagcggccggcggcaggccgggccatgagcggcaggggccgggccgggcctcgctgaccctggctccgcgcggcagcttccccagtttccgctccggtctctcggcatgagagtccgcccgggcccggggctgcggctgccccagacccgccgcacgctggcgcgctccgggcccgcggagccgcggtgctgatacctgcgccgcactgcgccgcccgcccgtccgctgtgtgccccgggggcgcggccatggaggtggtgggtgacttcgagtacagcaagagggatctcgtgggacacggggccttcgccgtggtcttccgggggcggcaccgccagaaaactgattgggaggtagctattaaaagtattaataaaaagaacttgtcaaaatcacaaatactgcttggaaaggaaattaaaatcttaaaggaacttcagcatgaaaatattgtagcactctatgatgttcaggaattacccaactctgtctttttggtgatggagtattgcaatggtggagacctcgcagattatttgcaagcgaaagggactctcagtgaagacacgatcagagtgtttctgcatcagattgctgctgccatgcgaatcctgcacagcaaaggaatcatccacagagatctcaaaccacagaacatcttgctgtcctatgccaatcgcagaaaatcaagtgtcagtggtattcgcatcaaaatagcggattttggttttgctcgttacctacatagtaacatgatggctgcaacactgtgtggatccccgatgtacatggctcctgaggttattatgtctcaacattatgatgctaaggctgacttgtggagcataggaacagtgatataccaatgcctagttggaaaaccaccttttcaggccaatagtcctcaagacttaaggatgttttatgaaaaaaacaggagcttaatgcctagtattcccagagaaacatcaccttatttggctaatctccttttgggtttgcttcagagaaaccaaaaagatagaatggactttgaagcgttttttagccatccttttcttgagcaaggtccagtaaaaaaatcttgcccagttccagtgcccatgtattctggttctgtctctggaagctcctgtggcagctctccatcttgtcgttttgcttctccaccatcccttccagatatgcagcatattcaggaagaaaacttatcttccccaccattgggtcctcccaactatctacaagtttccaaagattctgccagtactagtagcaagaactcttcttgtgacacggatgactttgttttggtgccacacaacatctcgtcagaccactcatgtgatatgccaatggggactgctggcagacgtgcttcaaatgaattcttggtgtgtggagggcagtgtcagcctactgtgtcacctcacagcgaaacagcaccaattccagttcctactcaaataaggaattatcagcgcatagagcagaatcttacatctactgccagctcaggcacaaatgtacatggttctccaagatctgcagtggtacgaaggtccaacaccagccccatgggcttcctccggccgggatcatgctccccagtaccagcagacacagcacagacagttggacgaaggctctccactgggtcttctaggccttactcaccttcccctttggttggtaccattcctgagcaattcagtcagtgctgctgtgggcatcctcagggccatgactccaggagtagaaactcctcaggttctccagtgccacaagctcagtccccacagtctctcttatcgggtgctagactgcagagcgcccccaccctcactgacatctatcagaacaagcagaagctcagaaaacagcactctgaccccgtgtgcccatcccatactggggctgggtacagctactcgcctcagcccagtcggcctggcagccttggaacttctcccaccaagcacttggggtcctctccacggagttctgactggttctttaaaactcctttgccaacaatcattggctctcctactaagaccacagctcctttcaaaatccctaaaactcaagcatcttccaacctgttagccttggttactcgtcatgggcctgctgaagaacagtcgaaagatgggaatgagccacgggaatgtgcccattgcctcttagtgcaaggaagtgagaggcagcgggccgagcagcagagcaaggcagtgtttggcagatctgtcagtaccgggaagttatcagatcaacaaggaaagactcctatatgtcgacatcagggcagcacagacagtttaaatacagaacgaccaatggatatagctccggcaggagcctgtggtggtgttctggcacctcctgcaggtacagcagcaagttccaaggctgtcctcttcactgtagggtctcctccacacagtgcggcagcccccacttgtacccacatgttccttcgaacaagaacaacctcagtggggcccagcaactccgggggctctctttgtgccatgagtggccgcgtgtgcgtggggtccccgcctggcccaggcttcggctcttcccctccaggagcagaggcagctcccagcctgagatacgtgccttacggtgcttcaccccccagcctagaggggctcatcacctttgaagcccctgaactgccggaggagacgctgatggagcgggaacacacagacaccttacgccatctgaatgtgatgctgatgttcactgagtgtgtgctggacctgacagccatgaggggaggaaaccctgagctgtgcacatctgctgtgtccttgtaccagatccaggagagtgtggtggtggaccagatcagtcagctgagcaaagactgggggtgggtggagcagctggtgttgtacatgaaagcagcacagctgcttgcggcttctctgcatcttgccaaagcccagatcaagtccgggaaactgagcccatccacagctgtgaaacaagttgtcaagaatctgaacgaacgatataaattctgcatcaccatgtgcaagaaacttacagaaaagctgaatcgattcttctctgacaaacagaggtttattgatgaaatcaacagtgtgactgcagagaaactcatctataattgtgctgtagaaatggttcagtctgcagccctggatgagatgtttcagcagaccgaagatattgtttatcgctatcataaggcagcccttcttttggaaggcctaagtaggattctacaggaccctgcagatattgaaaatgtgcataaatataaatgtagtattgagagaagactgtcggcgctctgccatagcaccgcaaccgtgtgagcagcaggctcatcccgtggaccggtggtgggaacgtgaggtgatgcctttgggattacagcttgagttctgtcaccccatccccaggaaactgtagcttcttaactggtgactaccaaagaacaagcagtgatttgaaaaaggaaaaacaatccaaaaactacatatttgtaggaaatctgccttattggagaaaatcaccctttccctttttctttgtagaagcaggagcaagagtgtttggctcccagtttggacttggtgaataaatgtaccttagaactaggataatcggtacagttattcttaaagataattaaaaatgaaacaaagtgagtgctcgtcactgggttcatcagagcagtgtgtgaaattccatgtgtttgctgaggtgtaaaggtaaatgtattcacccctcatccaggcagtttgatatttggagtaagtttgtttaaatctgagcatgcatctttaaacagctcaggaagaaatagcttaagaagaagtgaaacatggatcttggaagaaattttgaaatcttcaatttgatcctaatatggatacatgttaatcttccaaaatctttcatattgcactaatttattaaaacaactgtgtattggattttgtaatttaactaaggcacaatggacttgtttaaaatattttacttgattgtatacatagaccctttccagaattcacatgtaatctccagtgaacttttaagtggttaaaacttgtattcatgtgaacctttgcacattttttttttttacttctttatctacacctacagattttctcagtaatgtttttgttagcttttggttccattttttattgtgcatgcagaatgtacattgatgcctgtgaccttaggtttattaaaggctaggtttatttgggcagtattagaaacaaaatcatggatcaagagatactcttgataatttgaatagggccaaaacaaagttggtgacctaaaggcttgttagtgatgtggagttcctacatgcagtgagtggaaaatgaagttcgttttctcttaggaaaatgggcagctgtcttctgcctaatgtgtatttttcatgttaattctgacagttcaccaaatagctagtcatggagaatgcaggcagttaacttaatatccctccaggaatggttcctacgttgtgtattatttggtttcttttacttacctgcttgaatacttgaataaaccattcaccaattttaatccttttattttaatccttttacataaaataatctgaactctttgacaaattgcacagagctctttggcattaatctaattttaatgtactgataaaaacaaacatggttgtcctttactttgacaaagtaatgtaatttttaccttatttatctgtatgaaattccagtagttaatttgaacatttatttatatgacgtttgtatttttaggtctttaatacagtgtttctacctctcatttgtaactgcatgcattattcttgaaactaggtaaaactcactgaattgttgtgtaatagcctttttattattgcctgtacaaatgtatattaaggtaaaataaaactgacaaagtgtttctagggtgtagctgggtacatattaagtggcttgttgagccaggtacttccttagtgagtttagagacttggccatgaatatcctttgtcctgccccaggatttagatcttggctactgtcatgcaggcttccaggaacatagactgttttacctccacaaccctatttgttattagtgatactttattttatataatattttttattcacagtgaaatttcattcatgttctttcagttatcacctgtgttatctcagttgtaggtttattctatcctctcctcttcctctcccatttcttttttaacacaggatgaaacaggttcagagaggggaagtgattggcctaaagtcaggaactaggcaagtggtcaagccatgctttgtgactttcaagttaattcttcttgttcttgtatattaaaggtcttggggtagatggtgtgtgtgaaacagtgaagtctcaacagcagaaaagaacaaaatgtaaattcatgaataatggttctggttatacttccattatcaaggctaattaagagattttgccttgagtatagcaataataaacaaatgctttatgtttccctg

SEQ ID NO: 72 - protein, 1036 aa, Homo sapiens
MEVVGDFEYSKRDLVGHGAFAVVFRGRHRQKTDWEVAIKSINKKNLSKSQILLGKEIKILKELQHENIVALYDVQELPNSVFLVMEYCNGGDLADYLQAKGTLSEDTIRVFLHQIAAAMRILHSKGIIHRDLKPQNILLSYANRRKSSVSGIRIKIADFGFARYLHSNMMAATLCGSPMYMAPEVIMSQHYDAKADLWSIGTVIYQCLVGKPPFQANSPQDLRMFYEKNRSLMPSIPRETSPYLANLLLGLLQRNQKDRMDFEAFFSHPFLEQGPVKKSCPVPVPMYSGSVSGSSCGSSPSCRFASPPSLPDMQHIQEENLSSPPLGPPNYLQVSKDSASTSSKNSSCDTDDFVLVPHNISSDHSCDMPMGTAGRRASNEFLVCGGQCQPTVSPHSETAPIPVPTQIRNYQRIEQNLTSTASSGTNVHGSPRSAVVRRSNTSPMGFLRPGSCSPVPADTAQTVGRRLSTGSSRPYSPSPLVGTIPEQFSQCCCGHPQGHDSRSRNSSGSPVPQAQSPQSLLSGARLQSAPTLTDIYQNKQKLRKQHSDPVCPSHTGAGYSYSPQPSRPGSLGTSPTKHLGSSPRSSDWFFKTPLPTIIGSPTKTTAPFKIPKTQASSNLLALVTRHGPAEEQSKDGNEPRECAHCLLVQGSERQRAEQQSKAVFGRSVSTGKLSDQQGKTPICRHQGSTDSLNTERPMDIAPAGACGGVLAPPAGTAASSKAVLFTVGSPPHSAAAPTCTHMFLRTRTTSVGPSNSGGSLCAMSGRVCVGSPPGPGFGSSPPGAEAAPSLRYVPYGASPPSLEGLITFEAPELPEETLMEREHTDTLRHLNVMLMFTECVLDLTAMRGGNPELCTSAVSLYQIQESVVVDQISQLSKDWGWVEQLVLYMKAAQLLAASLHLAKAQIKSGKLSPSTAVKQVVKNLNERYKFCITMCKKLTEKLNRFFSDKQRFIDEINSVTAEKLIYNCAVEMVQSAALDEMFQQTEDIVYRYHKAALLLEGLSRILQDPADIENVHKYKCSIERRLSALCHSTATV

SEQ ID NO: 73 - DNA, 430 bp, Homo sapiens
gacagccacgaagatcctaccaaaatgaagcgcttcctcttcctcctactcaccatcagcctcctggttatggtacagatacaaactggactctcaggacaaaacgacaccagccaaaccagcagcccctcagcatccagcagcatgagcggaggcattttccttttcttcgtggccaatgccataatccacctcttctgcttcagttgaggtgacacgtctcagccttagccctgtgccccctgaaacagctgccaccatcactcgcaagagaatcccctccatctttgggaggggttgatgccagacatcaccaggttgtagaagttgacaggcagtgccatgggggcaacagccaaaataggggggtaatgatgtaggggccaagcagtgcccagctgggggagaataaagttacccttgtactgca

SEQ ID NO: 74 - DNA, 1442 bp, Homo sapiens
gccggccggtgagcgcctggggaccgcagaggtgagagtcgcgcccgggagtccgccgcctgcgccaggatggagttcgtgaaatgccttggccaccccgaagagttctacaacctggtgcgcttccggatcgggggcaagcggaaggtgatgcccaagatggaccaggactcgctcagcagcagcctgaaaacttgctacaagtatctcaatcagaccagtcgcagtttcgcagctgttatccaggcgctggatggggaaatgcgcaatgcagtgtgcatattttatctggttctccgagctctggacacactggaagatgacatgaccatcagtgtggaaaagaaggtcccgctgttacacaactttcactctttcctttaccaaccagactggcggttcatggagagcaaggagaaggatcgccaggtgctggaggacttcccaacgatctcccttgagtttagaaatctggctgagaaataccaaacagtgattgccgacatttgccggagaatgggcattgggatggcagagtttttggataagcatgtgacctctgaacaggagtgggacaagtactgccactatgttgctgggctggtcggaattggcctttcccgtcttttctcagcctcagagtttgaagaccccttagttggtgaagatacagaacgtgccaactctatgggcctgtttctgcagaaaacaaacatcatccgtgactatctggaagaccagcaaggaggaagagagttctggcctcaagaggtttggagcaggtatgttaagaagttaggggattttgctaagccggagaatattgacttggccgtgcagtgcctgaatgaacttataaccaatgcactgcaccacatcccagatgtcatcacctacctttcgagactcagaaaccagagtgtgtttaacttctgtgctattccacaggtgatggccattgccactttggctgcctgttataataaccagcaggtgttcaaaggggcagtgaagattcggaaagggcaagcagtgaccctcatgatggatgccaccaatatgccagctgtcaaagccatcatatatcagtatatggaagagatttatcatagaatccccgactcagacccatcttctagcaaaacaaggcagatcatctccaccatccggacgcagaatcttcccaactgtcagctgatttcccgaagccactactcccccatctacctgtcgtttgtcatgcttttggctgccctgagctggcagtacctgaccactctctcccaggtaacagaagactatgttcagactggagaacactgatcccaaatttgtccatagctgaagtccaccataaagtggatttactttttttctttaaaaaaaaaaaaaaaaaaaaaaaaaaaaaaaaaaaaaaaaaaaaaaaaaaaaaaaacctcggg

SEQ ID NO: 75 - protein, 417 aa, Homo sapiens
MEFVKCLGHPEEFYNLVRFRIGGKRKVMPKMDQDSLSSSLKTCYKYLNQTSRSFAAVIQALDGEMRNAVCIFYLVLRALDTLEDDMTISVEKKVPLLHNFHSFLYQPDWRFMESKEKDRQVLEDFPTISLEFRNLAEKYQTVIADICRRMGIGMAEFLDKHVTSEQEWDKYCHYVAGLVGIGLSRLFSASEFEDPLVGEDTERANSMGLFLQKTNIIRDYLEDQQGGREFWPQEVWSRYVKKLGDFAKPENIDLAVQCLNELITNALHHIPDVITYLSRLRNQSVFNFCAIPQVMAIATLAACYNNQQVFKGAVKIRKGQAVTLMMDATNMPAVKAIIYQYMEEIYHRIPDSDPSSSKTRQIISTIRTQNLPNCQLISRSHYSPIYLSFVMLLAALSWQYLTTLSQVTEDYVQTGEH

SEQ ID NO: 76 - DNA, 4618 bp, Homo sapiens
gccacgctcgggtcgggggcgggctgacgccgccgccgccgcgggaggagggacaaaggggtgggtccccgcgggtcggcaccccggcggttgggctgcgggtcagagcactgtccggtggtgcccaggaggagtaggagcaggagcagaagcagaagcggggtccggagctgcgcgcctacgcgggacctgtgtccgaaatgccggtgcgaggagaccgcgggtttccaccccggcgggagctgtcaggttggctccgcgccccaggcatggaagagctgatatgggaacagtacactgtgaccctacaaaaggattccaaaagaggatttggaattgcagtgtccggaggcagagacaacccccactttgaaaatggagaaacgtcaattgtcatttctgatgtgctcccgggtgggcctgctgatgggctgctccaagaaaatgacagagtggtcatggtcaatggcacccccatggaggatgtgcttcattcgtttgcagttcagcagctcagaaaaagtgggaaggtcgctgctattgtggtcaagaggccccggaaggtccaggtggccgcacttcaggccagccctcccctggatcaggatgaccgggcttttgaggtgatggacgagtttgatggcagaagtttccggagtggctacagcgagaggagccggctgaacagccatggggggcgcagccgcagctgggaggacagcccggaaagggggcgtccccatgagcgggcccggagccgggagcgggacctcagccgggaccggagccgtggccggagcctggagcggggcctggaccaagaccatgcgcgcacccgagaccgcagccgtggccggagcctggagcggggcctggaccacgactttgggccatcccgggaccgggaccgtgaccgcagccgcggccggagcattgaccaggactacgagcgagcctatcaccgggcctacgacccagactacgagcgggcctacagcccggagtacaggcgcggggcccgccacgatgcccgctctcggggaccccgaagccgcagccgcgagcacccgcactcacggagccccagccccgagcctagggggcggccggggcccatcggggtcctcctgatgaaaagcagagcgaacgaagagtatggtctccggcttgggagtcagatcttcgtaaaggaaatgacccgaacgggtctggcaactaaagatggcaaccttcacgaaggagacataattctcaagatcaatgggactgtaactgagaacatgtctttaacggatgctcgaaaattgatagaaaagtcaagaggaaaactacagctagtggtgttgagagacagccagcagaccctcatcaacatcccgtcattaaatgacagtgactcagaaatagaagatatttcagaaatagagtcaaaccgatcattttctccagaggagagacgtcatcagtattctgattatgattatcattcctcaagtgagaagctgaaggaaaggccaagttccagagaggacacgccgagcagattgtccaggatgggtgcgacacccactccctttaagtccacaggggatattgcaggcacagttgtcccagagaccaacaaggaacccagataccaagaggaccccccagctcctcaaccaaaagcagccccgagaacttttcttcgtcctagtcctgaagatgaagcaatatatggccctaataccaaaatggtaaggttcaagaagggagacagcgtgggcctccggttggctggtggcaatgatgtcgggatatttgttgctggcattcaagaagggacctcggcggagcaggagggccttcaagaaggagaccagattctgaaggtgaacacacaggatttcagaggattagtgcgggaggatgccgttctctacctgttagaaatccctaaaggtgaaatggtgaccattttagctcagagccgagccgatgtgtatagagacatcctggcttgtggcagaggggattcgttttttataagaagccactttgaatgtgagaaggaaactccacagagcctggccttcaccagaggggaggtcttccgagtggtagacacactgtatgacggcaagctgggcaactggctggctgtgaggattgggaacgagttggagaaaggcttaatccccaacaagagcagagctgaacaaatggccagtgttcaaaatgcccagagagacaacgctggggaccgggcagatttctggagaatgcgtggccagaggtctggggtgaagaagaacctgaggaaaagtcgggaagacctcacagctgttgtgtctgtcagcaccaagttcccagcttatgagagggttttgctgcgagaagctggtttcaagagacctgtggtcttattcggccccatagctgatatagcaatggaaaaattggctaatgagttacctgactggtttcaaactgctaaaacggaaccaaaagatgcaggatctgagaaatccactggagtggtccggttaaataccgtgaggcaaattattgaacaggataagcatgcactactggatgtgactccgaaagctgtggacctgttgaattacacccagtggttcccaattgtgatttttttcaacccagactccagacaaggtgtcaaaaccatgagacaaaggttaaatccaacgtccaacaaaagttctcgaaagttatttgatcaagccaacaagcttaaaaaaacgtgtgcacacctttttacagctacaatcaacctaaattcagccaatgatagctggtttggcagcttaaaggacactattcagcatcagcaaggagaagcggtttgggtctctgaaggaaagatggaagggatggatgatgaccccgaagaccgcatgtcctacttaaccgccatgggcgcggactatctgagttgcgacagccgcctcatcagtgactttgaagacacggacggtgaaggaggcgcctacactgacaatgagctggatgagccagccgaggagccgctggtgtcgtccatcacccgctcctcggagccggtgcagcacgaggagagcataaggaaacccagcccagagccacgagctcagatgaggagggctgctagcagcgatcaacttagggacaatagcccgcccccagcattcaagccagagccgcccaaggccaaaacccagaacaaagaagaatcctatgacttctccaaatcctatgaatataagtcaaacccctctgccgttgctggtaatgaaactcctggggcatctaccaaaggttatcctcctcctgttgcagcaaaacctacctttgggcggtctatactgaagccctccactcccatccctcctcaagagggtgaggaggtgggagagagcagtgaggagcaagataatgctcccaaatcagtcctgggcaaagtcaaaatatttgagaagatggatcacaaggccaggttacagagaatgcaggagctccaggaagcacagaatgcaaggatcgaaattgcccagaagcatcctgatatctatgcagttccaatcaaaacgcacaagccagaccctggcacgccccagcacacgagttccagaccccctgagccacagaaagctccttccagaccttatcaggataccagaggaagttatggcagtgatgccgaggaggaggagtaccgccagcagctgtcagaacactccaagcgcggttactatggccagtctgcccgataccgggacacagaattatagatgtctgagcacggactctcccaggcctgcctgcatggcatcagactagccactcctgccaggccgccgggatggttcttctccagttagaatgcaccatggagacgtggtgggactccagctcgtgtgtcctcatggagaacccaggggacagctggtgcaaattcagaactgagggctctgtttgtgggactgggttagaggagtctgtggctttttgttcagaattaagcagaacactgcagtcagatcctgttacttgcttcagtggaccgaaatctgtattctgtttgcgtacttgtaatatgtatattaagaagcaataactatttttcctcattaatagctgccttcaaggactgtttcagtgtgagtcagaatgtgaaaaaggaataaaaaatactgttgggctcaaactaaattcaaagaagtactttattgcaactcttttaagtgccttggatgagaagtgtcttaaattttcttcctttgaagctttaggcagagccataatggactaaaacattttgactaagtttttataccagcttaatagctgtagttttccctgcactgtgtcatcttttcaaggcatttgtctttgtaatattttccataaatttggactgtctatatcataactatacttgatagtttggctataagtgctcaatagcttgaagcccaagaagttggtatcgaaatttgttgtttgtttaaacccaagtgctgcacaaaagcagatacttgaggaaaacactatttccaaaagcacatgtattgacaacagttttataatttaataaaaaggaatacattgcaatccgtaaaaaaaaaaaaaaaaa

SEQ ID NO: 77 - protein, 1190 aa, Homo sapiens
MPVRGDRGFPPRRELSGWLRAPGMEELIWEQYTVTLQKDSKRGFGIAVSGGRDNPHFENGETSIVISDVLPGGPADGLLQENDRVVMVNGTPMEDVLHSFAVQQLRKSGKVAAIVVKRPRKVQVAALQASPPLDQDDRAFEVMDEFDGRSFRSGYSERSRLNSHGGRSRSWEDSPERGRPHERARSRERDLSRDRSRGRSLERGLDQDHARTRDRSRGRSLERGLDHDFGPSRDRDRDRSRGRSIDQDYERAYHRAYDPDYERAYSPEYRRGARHDARSRGPRSRSREHPHSRSPSPEPRGRPGPIGVLLMKSRANEEYGLRLGSQIFVKEMTRTGLATKDGNLHEGDIILKINGTVTENMSLTDARKLIEKSRGKLQLVVLRDSQQTLINIPSLNDSDSEIEDISEIESNRSFSPEERRHQYSDYDYHSSSEKLKERPSSREDTPSRLSRMGATPTPFKSTGDIAGTVVPETNKEPRYQEDPPAPQPKAAPRTFLRPSPEDEAIYGPNTKMVRFKKGDSVGLRLAGGNDVGIFVAGIQEGTSAEQEGLQEGDQILKVNTQDFRGLVREDAVLYLLEIPKGEMVTILAQSRADVYRDILACGRGDSFFIRSHFECEKETPQSLAFTRGEVFRVVDTLYDGKLGNWLAVRIGNELEKGLIPNKSRAEQMASVQNAQRDNAGDRADFWRMRGQRSGVKKNLRKSREDLTAVVSVSTKFPAYERVLLREAGFKRPVVLFGPIADIAMEKLANELPDWFQTAKTEPKDAGSEKSTGVVRLNTVRQIIEQDKHALLDVTPKAVDLLNYTQWFPIVIFFNPDSRQGVKTMRQRLNPTSNKSSRKLFDQANKLKKTCAHLFTATINLNSANDSWFGSLKDTIQHQQGEAVWVSEGKMEGMDDDPEDRMSYLTAMGADYLSCDSRLISDFEDTDGEGGAYTDNELDEPAEEPLVSSITRSSEPVQHEESIRKPSPEPRAQMRRAASSDQLRDNSPPPAFKPEPPKAKTQNKEESYDFSKSYEYKSNPSAVAGNETPGASTKGYPPPVAAKPTFGRSILKPSTPIPPQEGEEVGESSEEQDNAPKSVLGKVKIFEKMDHKARLQRMQELQEAQNARIEIAQKHPDIYAVPIKTHKPDPGTPQHTSSRPPEPQKAPSRPYQDTRGSYGSDAEEEEYRQQLSEHSKRGYYGQSARYRDTEL

SEQ ID NO: 78 - DNA, 12227 bp, Homo sapiens
tgagctgcgaggcccgagagtcagaacctgggggagagggatggtctctgcacgggggggagccggaggagccgccgccgctgccgacgccaccgccgcagccgccgccgccgccgccccggcacccgcctcccggcgctgacggtctcgtacgaagccggcgagggggagccagcagcggcggtcgccggcacgccgcccagcatggtccgggaaaccaggcatctctgggtgggcaacttacccgagaacgtgcgggaagagaagatcatcgagcatttcaaacgatatggccgcgtggaaagtgtcaaaattcttcccaagaggggatctgaaggaggagtggctgcctttgtggattttgtggacatcaaaagtgcacagaaagctcacaactcggtcaacaaaatgggtgacagagacctacgcacggattataatgaaccaggcaccatcccgagtgctgctcggggattggatgatacagtttccatagcatctcgtagtagagaggtttctgggttcagaggaggtggtggagggcctgcttatggtcccccaccgtcacttcatgcacgagaaggacgttatgagcggagacttgatggggcttcagataacagggagcgtgcttatgaacatagtgcctatggacaccatgaacgggggacgggaggatttgatcggacaagacattacgatcaggattactatagagatcctcgagagcggactttacaacatgggctctattacgcttctcggagtcgaagtccaaatcgctttgatgctcatgacccccgatatgaacctagggctcgcgagcagtttacactgcccagtgtggtacacagggatatctacagggatgatattacccgggaggtacgaggcagaaggccagagcggaattaccagcacagcaggagtcggtcaccacattcatcccagtctagaaatcagtctcctcagagactggctagccaagcatctagacccacaaggtcccctagcggcagcggctctagaagtagatcctccagtagtgattcaatcagcagcagcagtagtaccagcagtgacagcagtgattccagcagtagttcaagtgatgattctccagctcgatcagttcagtctgcagcagtccctgcacccacttcccagttgctttcatctctggaaaaagatgagccccgtaaaagttttggcatcaaggtccagaatcttccagtacgctctacagatacaagccttaaagatggccttttccatgaatttaagaaatttggaaaagtaacttcagtgcagatacatggaacttcagaagagaggtatggtctggtattctttcggcagcaagaggaccaagaaaaagccttgactgcatcaaaaggaaaacttttctttggcatgcagattgaagtaacagcatggataggtccagaaacagaaagtgaaaatgaatttcgccccttggatgaaaggatagatgaatttcaccccaaagcaacaagaactctctttattggcaaccttgaaaaaaccactacttaccatgaccttcgcaacatcttccagcgctttggagaaattgtggatattgacattaagaaagtaaatggagttcctcagtatgcgtttctgcaatactgtgatattgctagcgtttgtaaagctattaagaagatggatggggaatatcttggaaataatcgcctcaagctgggttttggaaagagcatgcctacaaactgcgtgtggctagatgggctttcttcgaatgtgtcagatcagtatttaacacgacatttctgccgatatgggcctgtggtaaaggtggtgtttgaccgcttaaaaggcatggccctggttctctacaatgaaattgaatatgcacaagcagctgtaaaagagaccaaagggaggaaaatcggtgggaataaaattaaggtggattttgcaaatcgggaaagtcagctggctttttatcactgcatggagaaatctggtcaagacatcagagacttttatgaaatgttagccgaaagaagagaggaacgaagggcatcctacgactataaccaagatcgtacatattatgagagtgttcgaactccaggcacttatcctgaggattccaggcgggactatccagctcgagggagagagttttattcagaatgggaaacttaccaaggagactactatgaatcacgatactacgatgatcctcgggaatacagggattacaggaatgatccttatgaacaagatattagggaatatagttacaggcaaagggaacgagaaagagaacgtgaaagatttgagtctgaccgggacagagaccatgagaggaggccgattgaacgaagtcaaagtcctgttcacttgcgacgtccacagagtcctggagcgtctccctctcaggcagagaggttgccgagtgattctgagaggaggctttacagccgatcctcagaccggagtggaagctgtagctcactctcccctccaagatatgagaaactggacaagtctcgtttggagcgctatacaaaaaatgaaaagacagataaagaacgaacttttgatccggagagagtggagagagagagacgcttaatacggaaggaaaaagtggaaaaggacaaaactgacaagcagaaacgcaaaggaaaggttcactcccctagttctcagtcttcagaaacggaccaagaaaatgagcgagagcaaagccctgaaaagcccaggagttgtaataaactgagcagagagaaagctgacaaagagggaatagcgaaaaaccgcctggaactcatgccttgcgtggttttgactcgagtgaaagagaaagagggaaaggtcattgaccacactcctgtggaaaagttgaaagccaagcttgataatgacactgtcaaatcttctgccctggaccagaaacttcaggtctctcagacggagcctgcaaaatctgacttgtctaaactggaatcagttagaatgaaagtaccaaaggaaaaggggctttcaagccatgttgaagtggtggagaaggaaggcaggcttaaagccaggaagcacctcaagcctgagcagcctgcagatggggtaagtgctgtggatctggagaagctggaagccaggaaaaggcgctttgcagattccaatttaaaagcagaaaagcaaaaaccagaggtcaagaaaagcagtccagagatggaggatgctcgcgtgctttcaaaaaagcagcctgacgtgtcctctagagaggtcattctgctgagggaaggagaggctgaaagaaagcctgtgaggaaagaaattcttaaaagagaatctaaaaaaatcaaactggacagacttaatactgttgccagccccaaagactgtcaggagcttgccagtatttctgttgggtctggctcaaggcccagctcagacctacaagcaagactgggagaactagcaggtgaatctgtggaaaatcaagaagtccaatcaaaaaagcccattccctcaaaaccacagctcaaacagctgcaggtattagatgatcaaggaccagagagagaagacgttaggaaaaactattgcagtcttcgtgatgaaacacctgaacgtaaatcaggccaagagaaatcacattcagtaaatactgaagaaaaaattggcattgacatcgatcacacgcagagttaccgaaaacaaatggaacagagtcgtaggaaacagcagatggaaatggaaatagccaagtctgagaagtttggcagtcctaaaaaagatgtagatgaatatgaaagacgtagcctcgttcacgaggtaggcaaaccccctcaagatgtcactgatgactctcctcctagcaaaaagaaaaggatggatcatgtcgattttgatatctgcaccaagcgagaacggaattacagaagttcacgccaaatcagcgaagattctgaaaggactggtggttctcccagtgtccgacatggttccttccatgaagatgaggatcccataggctcccctaggctactgtcagtaaaagggtctcctaaagtagatgaaaaagtcctcccctattctaacataacagtcagggaagagtctttaaaatttaatccttatgattctagcaggagagaacagatggcagatatggccaaaataaaactatctgtcttgaattctgaagatgaactaaatcgttgggactctcagatgaaacaggatgctggcagatttgatgtgagtttcccaaacagcataattaagagagatagccttcgaaaaaggtctgtacgagatctggaacctggtgaggtgccttctgattctgacgaagatggtgaacacaaatcccactcacccagagcctctgcattatatgaaagttctcgattgtcttttttattgagggacagagaagacaagctacgtgagcgagatgaaagactctctagttctttagaaaggaacaaattttactcttttgcattggataagacaatcacaccagacactaaagctttgcttgaaagagctaaatccctctcttcatctcgtgaagaaaattggtcttttcttgattgggactcccgatttgcaaattttcgaaacaacaaagataaagaaaaggttgactctgctccaagacctattccatcctggtacatgaaaaagaagaaaattaggactgattcagaagggaaaatggatgataagaaagaggaccataaagaagaagagcaagagaggcaggaattgtttgcttctcgttttttacacagctcaatctttgaacaagattccaagcgattgcagcatctagagagaaaagaggaagattctgacttcatttctggtaggatctatgggaagcagacatctgagggagcaaacagcacaactgattccattcaagaaccagtagttctgttccatagcagatttatggagctcacacggatgcaacagaaagaaaaagaaaaagaccagaaacccaaagaggttgagaaacaggaagatacagagaatcatcccaagaccccagaatctgctcctgagaataaagattcagaactgaaaactccaccttccgttgggcctccaagtgtcacagtcgtaactctagaatcagccccatcagcactagagaagaccactggtgacaaaacggtagaggcgcctttggtaacagaagagaagactgtggagccagctaccgtctcagaagaagcaaagcctgcatctgaacctgctcctgcccctgtggaacagctggaacaagtagacctgcccccaggagcagaccccgataaagaagctgccatgatgcctgcgggtgttgaggaaggttcatcaggtgaccagccgccttatctggatgccaagcctccaactcccggggcctcgttttcccaggcagagagcaacgtagatccagagcctgacagtacccagccactttcaaaaccagctcagaagtctgaggaagccaatgagccaaaggccgaaaagccagacgccactgcagatgctgagcctgatgcaaaccagaaagccgaagctgctcctgagtctcagcccccagcttctgaagatttagaggttgatcctccagttgctgcaaaggataaaaagccaaacaaaagcaagcgttcaaagacccctgttcaggcagctgcagtgagtatcgtggagaagcccgtcacaaggaagagtgagaggatagaccgggaaaaactcaagcggtccaattctcctcggggagaagcacagaagcttttggaattgaagatggaggcagagaagattacaaggactgcttctaaaaactctgctgcagaccttgaacatcccgaaccaagtttgcctctcagccgaacaaggcgccggaatgtaaggagcgtctatgcaaccatgggtgaccatgaaaaccgctctcctgtcaaagagcccgttgagcaaccaagagtgaccagaaagagattggagcgagagcttcaggaggctgcagcggttcccaccacccctcggaggggaaggcctccaaagacacgccggcgagccgatgaagaggaggagaacgaggccaaggaacctgcagaaacactcaagccacctgagggatggcggtcgccaaggtcccagaaaactgcagctggtggtggaccccaagggaaaaagggaaaaaatgaaccgaaggtggatgctacacgtcctgaggccaccactgaggtgggcccccaaataggcgtgaaagagagctccatggaacccaaggctgctgaggaggaggcagggagtgaacagaaacgtgacagaaaagatgctggcacagacaaaaacccccctgaaaccgcccctgttgaagttgtagagaaaaaaccggcccctgaaaaaaactccaaatcaaagagaggaagatctcgaaactccaggttagcagtggacaaatctgcaagtctgaaaaatgtggatgctgctgtcagtcccaggggggctgcagcacaggcaggggagagggaatctggggtggtggcagtctcccctgagaaaagtgagagtccccaaaaggaggatggtttatcatcccagttgaaaagtgatccagttgatccagacaaggaaccagagaaagaagacgtgtctgcctctgggccgtccccagaagccacccagttagccaagcagatggagctggagcaggccgtggaacacatcgcaaagctcgctgaggcctctgcctctgctgcctataaggcagatgcaccagagggccttgccccagaggacagggacaagcctgcacaccaagcaagtgaaacagagctggctgcggccatcggctccatcatcaatgacatttctggggagccagaaaacttcccagcacctccaccttatcctggagaatcccagacagatctgcaaccccccgcaggtgcacaggcgctgcagccttctgaggaaggaatggagacagatgaggctgtatctggcatcctggaaactgaggctgctacagaatcttctaggcctccagtcaatgctcctgacccctcagccggcccaacagataccaaggaagccagaggaaatagcagtgaaacctcacactcagtgccagaagccaaagggtctaaagaagtggaagtcactcttgttcggaaagacaaagggcgccagaaaacaacccgatcacgccgcaagcgaaacacaaacaagaaagtggtggctcctgtagagagccatgtccctgaatccaaccaagctcaaggtgagagtcctgctgcaaatgaggggacaacagtacagcaccccgaagccccacaggaagaaaagcagagtgagaaaccccattccactcctcctcagtcatgtacttctgacctaagcaagattccctccacagagaattcgtcccaagaaatcagtgttgaggaaaggactccaaccaaagcatctgtgcccccagaccttcccccacctccccagccagcaccggtggatgaggagcctcaagccaggttcagggtgcattccatcattgaaagtgacccggtgaccccacccagcgatccaagcatccccatacccacactgccttctgtaactgcagcaaagctctcacctcctgtcgcctctggggggatcccacaccagagcccccctactaaggtgacagagtggatcacaaggcaggaggagccacgggctcagtctactccatctccagctcttcccccagacacaaaggcctctgatgttgacaccagctccagcaccctgaggaagattctcatggaccccaagtatgtgtctgccacaagtgtcacttccacaagtgtcaccacagccattgcagagcctgtcagtgctgccccttgcctacatgaggccccgcccccgccagttgactctaaaaagcctttagaagaaaaaacagcacctccagtgacaaacaactctgagatacaagcctcggaggtgctggtagctgctgacaaggaaaaggtggctccagtcattgctcccaaaattacctctgttattagccggatgcctgtcagcattgacctggaaaattcacagaagataaccttggcaaaaccagctcctcaaaccctcactggtctggtgagcgcactcactggcctggtgaacgtctccctggtcccggtgaatgccctgaaaggccccgtgaagggctcagtgaccacactgaaaagtttggtgagcacccctgctgggcccgtgaacgtcctgaaagggcctgtgaatgttcttacggggccagtgaatgttctcaccactccagtgaacgccacggtgggcacagtgaatgccgccccaggcacagtcaatgccgctgcgagtgcagtgaatgccacagcaagtgcagtgaccgtcacagcgggtgcggttactgctgcatctggtggtgtaacggccacaacaggcacggtgacaatggcaggggcagtgattgcgccgtcaacaaagtgcaaacagagagcgagtgctaatgaaaacagtcggttccacccagggtccatgcctgtgatcgacgatcgtccggcagacgcgggctcaggggcggggctgcgtgtgaacacttctgaaggggttgtgctcctgagttactcagggcagaagaccgaaggcccacagcggatcagcgccaagatcagccagatccccccggccagtgcaatggacattgaatttcagcagtcagtgtccaagtcccaggtcaaacctgattctgtcacagcatcgcagcctccatccaaaggccctcaagctcctgcaggctatgcgaacgtggccacccattccacgttggtactgaccgcccagacatataatgcctctcctgtgatttcgtctgtgaaggccgataggccatccttggagaagcccgagcccattcacctctcggtgtccacgcctgtcacccagggaggcacagtgaaggttctcacccaggggatcaacacaccccctgtgctggttcacaaccagctggtcctcaccccaagcattgtcaccacaaacaagaagcttgctgaccccgtcacccttaaaatcgagaccaaggtccttcagccggccaacctggggtccacgctcacgccccaccaccctcctgctctgcccagcaaactgcctacagaagtcaaccatgtcccctcggggcccagcatcccagcagatcgaactgtctcccatttggcagctgcaaagctagatgctcattctcctcgaccaagtggacccgggccatcctcattcccaagggcaagccaccccagcagtactgcatctacggcgctctccaccaacgccacagtcatgctggctgcaggcatcccagtgccccagttcatctccagcatccacccagagcagtctgtcatcatgccaccccacagcatcacccagactgtgtccctgagccacctctcccagggcgaggtgagaatgaacactcccacgctgcccagtatcacctacagcatccggccagaagcgcttcactctcctcgggctccgctgcagccccagcaaatagaggtcagggccccacagcgtgccagcaccccgcagccagccccagctggtgtgcctgcactggcctcccagcaccctcccgaggaggaagtgcattatcaccttcctgtcgctcgagccacagcccctgtgcagtcagaggtactagtcatgcagtctgagtaccgactgcacccctatactgtgccacgggatgtgaggatcatggtgcatccacatgtgacggcagtcagcgagcagcccagggccgcggatggggtggtgaaggtgccaccagccagcaaggcccctcagcagccagggaaggaagctgccaagacaccagatgccaaagctgcccccacccccacccctgcccccgtccctgtccctgtcccccttcctgcccctgctcctgcccctcatggtgaggcccgtatcctcacagttacccccagtaaccaactccaggggctgcctctgacccctcctgtggtggtgacccatggggtgcagattgtgcactccagcggggagctgtttcaagagtaccggtacggcgacatccgcacctaccaccccccggcccagctcacacacactcagtttcccgccgcttcctctgttggcctgccttcccggaccaagacagctgctcagggccctcctcctgaaggtgagcccctgcagcctcctcagcctgtgcagtccacacagcctgcccagcctgcaccaccctgcccgccctcccagctcggtcagcccggccagccaccaagcagcaagatgcctcaagtgtcccaggaggcaaaggggacccagacgggagtagagcagcctcgcctcccagctggacctgcaaacaggccacctgagcctcacacccaggttcagagggcacaagcagaaacaggcccgacttccttcccctcccctgtgtctgtctccatgaagcctgaccttccagtctctcttcccactcagactgccccaaaacagccgttgtttgtcccaacaacctctggccccagcaccccaccaggactggttctgccacacactgaattccagccagcccccaaacaagattcctctccacacctgacttcccagagacccgtggatatggttcaacttctgaagaagtaccccatcgtgtggcagggcctgctggccctcaagaatgacacagctgctgtgcagctccacttcgtctctggcaacaacgtcctggcccatcggtccctgcccctttctgaaggagggcccccactaaggatcgcccagaggatgcggctggaggcaacgcagctggaaggggttgcccgaaggatgacggtggagacagattactgtctgctgctggctctgccctgtggccgtgaccaagaggatgttgtgagccagaccgagtccctcaaggctgccttcatcacttacctgcaggccaagcaggcggcagggatcatcaacgttcccaaccctggctccaatcagcctgcctacgtgctgcagatcttcccgccctgtgagttctctgagagtcacctgtcccgcctggcccctgacctccttgccagcatctccaacatctctccccacctcatgattgtcattgcctccgtgtgagccactgagtggttatcacctcagtgaatcttcccagggctctgcagtaaaaacaaaggacaacccagccaagcagaggaagaagctgccgaaggggacagactccactgccagacggccagccgtttgctgtcctgccgcccggctcagtcggccagacttcctctaggagtggtgctgctaccttgtatgtttacataatgctttagcccaaggacacatcaccaacccatggactcgcagacaccggggctgggtttctctttcctctttttggagaaaaggaacagggcagtggaatgaaaattttttgtttgtttgtttttaagaaacaagaaaacagaactgcctttgcactaaattagtgacttggacttttgcccagtgaagacaggctgtgacactctggatgtcttggtgtgtgtagacacacattgcagactcttaacgcaggaaggacttcaaacttctgctgagaccttggggtcaaggaacatttcattggttttttttgtccacccccatctcccttgctcatttggatgcgtcaccttaattctcctgctgccaccgtctttgattcaccgggatgtacagtttacagttgaagagcaaacagaaaggttttctcttggtgggatatgcagaacttgggatgtgtgtatatataaatatataatatatataaatatatataatactgacttaaaaaatcaaatcccccgacatacgttttttttaatctgtgccaaaaatgtgttttcagaggaaatcttattttcatattcagactttgtattgcccactcatttgtataagtgcgcttcggtacagcacgggtcctgctcccgcgatgtggaagtgtcacacggcacctgtacaaaaagactggctaacccctcttcctattaccttgatctcttcccccaacttcctaacacttattaatttatgaaactgtttttctcagcgcagttttgttttgtgtgtccattggattacaaactttattaaaaaatataaaacac

SEQ ID NO: 79 - protein, 3664 aa, Homo sapiens
MVRETRHLWVGNLPENVREEKIIEHFKRYGRVESVKILPKRGSEGGVAAFVDFVDIKSAQKAHNSVNKMGDRDLRTDYNEPGTIPSAARGLDDTVSIASRSREVSGFRGGGGGPAYGPPPSLHAREGRYERRLDGASDNRERAYEHSAYGHHERGTGGFDRTRHYDQDYYRDPRERTLQHGLYYASRSRSPNRFDAHDPRYEPRAREQFTLPSVVHRDIYRDDITREVRGRRPERNYQHSRSRSPHSSQSRNQSPQRLASQASRPTRSPSGSGSRSRSSSSDSISSSSSTSSDSSDSSSSSSDDSPARSVQSAAVPAPTSQLLSSLEKDEPRKSFGIKVQNLPVRSTDTSLKDGLFHEFKKFGKVTSVQIHGTSEERYGLVFFRQQEDQEKALTASKGKLFFGMQIEVTAWIGPETESENEFRPLDERIDEFHPKATRTLFIGNLEKTTTYHDLRNIFQRFGEIVDIDIKKVNGVPQYAFLQYCDIASVCKAIKKMDGEYLGNNRLKLGFGKSMPTNCVWLDGLSSNVSDQYLTRHFCRYGPVVKVVFDRLKGMALVLYNEIEYAQAAVKETKGRKIGGNKIKVDFANRESQLAFYHCMEKSGQDIRDFYEMLAERREERRASYDYNQDRTYYESVRTPGTYPEDSRRDYPARGREFYSEWETYQGDYYESRYYDDPREYRDYRNDPYEQDIREYSYRQRERERERERFESDRDRDHERRPIERSQSPVHLRRPQSPGASPSQAERLPSDSERRLYSRSSDRSGSCSSLSPPRYEKLDKSRLERYTKNEKTDKERTFDPERVERERRLIRKEKVEKDKTDKQKRKGKVHSPSSQSSETDQENEREQSPEKPRSCNKLSREKADKEGIAKNRLELMPCVVLTRVKEKEGKVIDHTPVEKLKAKLDNDTVKSSALDQKLQVSQTEPAKSDLSKLESVRMKVPKEKGLSSHVEVVEKEGRLKARKHLKPEQPADGVSAVDLEKLEARKRRFADSNLKAEKQKPEVKKSSPEMEDARVLSKKQPDVSSREVILLREGEAERKPVRKEILKRESKKIKLDRLNTVASPKDCQELASISVGSGSRPSSDLQARLGELAGESVENQEVQSKKPIPSKPQLKQLQVLDDQGPEREDVRKNYCSLRDETPERKSGQEKSHSVNTEEKIGIDIDHTQSYRKQMEQSRRKQQMEMEIAKSEKFGSPKKDVDEYERRSLVHEVGKPPQDVTDDSPPSKKKRMDHVDFDICTKRERNYRSSRQISEDSERTGGSPSVRHGSFHEDEDPIGSPRLLSVKGSPKVDEKVLPYSNITVREESLKFNPYDSSRREQMADMAKIKLSVLNSEDELNRWDSQMKQDAGRFDVSFPNSIIKRDSLRKRSVRDLEPGEVPSDSDEDGEHKSHSPRASALYESSRLSFLLRDREDKLRERDERLSSSLERNKFYSFALDKTITPDTKALLERAKSLSSSREENWSFLDWDSRFANFRNNKDKEKVDSAPRPIPSWYMKKKKIRTDSEGKMDDKKEDHKEEEQERQELFASRFLHSSIFEQDSKRLQHLERKEEDSDFISGRIYGKQTSEGANSTTDSIQEPVVLFHSRFMELTRMQQKEKEKDQKPKEVEKQEDTENHPKTPESAPENKDSELKTPPSVGPPSVTVVTLESAPSALEKTTGDKTVEAPLVTEEKTVEPATVSEEAKPASEPAPAPVEQLEQVDLPPGADPDKEAAMMPAGVEEGSSGDQPPYLDAKPPTPGASFSQAESNVDPEPDSTQPLSKPAQKSEEANEPKAEKPDATADAEPDANQKAEAAPESQPPASEDLEVDPPVAAKDKKPNKSKRSKTPVQAAAVSIVEKPVTRKSERIDREKLKRSNSPRGEAQKLLELKMEAEKITRTASKNSAADLEHPEPSLPLSRTRRRNVRSVYATMGDHENRSPVKEPVEQPRVTRKRLERELQEAAAVPTTPRRGRPPKTRRRADEEEENEAKEPAETLKPPEGWRSPRSQKTAAGGGPQGKKGKNEPKVDATRPEATTEVGPQIGVKESSMEPKAAEEEAGSEQKRDRKDAGTDKNPPETAPVEVVEKKPAPEKNSKSKRGRSRNSRLAVDKSASLKNVDAAVSPRGAAAQAGERESGVVAVSPEKSESPQKEDGLSSQLKSDPVDPDKEPEKEDVSASGPSPEATQLAKQMELEQAVEHIAKLAEASASAAYKADAPEGLAPEDRDKPAHQASETELAAAIGSIINDISGEPENFPAPPPYPGESQTDLQPPAGAQALQPSEEGMETDEAVSGILETEAATESSRPPVNAPDPSAGPTDTKEARGNSSETSHSVPEAKGSKEVEVTLVRKDKGRQKTTRSRRKRNTNKKVVAPVESHVPESNQAQGESPAANEGTTVQHPEAPQEEKQSEKPHSTPPQSCTSDLSKIPSTENSSQEISVEERTPTKASVPPDLPPPPQPAPVDEEPQARFRVHSIIESDPVTPPSDPSIPIPTLPSVTAAKLSPPVASGGIPHQSPPTKVTEWITRQEEPRAQSTPSPALPPDTKASDVDTSSSTLRKILMDPKYVSATSVTSTSVTTAIAEPVSAAPCLHEAPPPPVDSKKPLEEKTAPPVTNNSEIQASEVLVAADKEKVAPVIAPKITSVISRMPVSIDLENSQKITLAKPAPQTLTGLVSALTGLVNVSLVPVNALKGPVKGSVTTLKSLVSTPAGPVNVLKGPVNVLTGPVNVLTTPVNATVGTVNAAPGTVNAAASAVNATASAVTVTAGAVTAASGGVTATTGTVTMAGAVIAPSTKCKQRASANENSRFHPGSMPVIDDRPADAGSGAGLRVNTSEGVVLLSYSGQKTEGPQRISAKISQIPPASAMDIEFQQSVSKSQVKPDSVTASQPPSKGPQAPAGYANVATHSTLVLTAQTYNASPVISSVKADRPSLEKPEPIHLSVSTPVTQGGTVKVLTQGINTPPVLVHNQLVLTPSIVTTNKKLADPVTLKIETKVLQPANLGSTLTPHHPPALPSKLPTEVNHVPSGPSIPADRTVSHLAAAKLDAHSPRPSGPGPSSFPRASHPSSTASTALSTNATVMLAAGIPVPQFISSIHPEQSVIMPPHSITQTVSLSHLSQGEVRMNTPTLPSITYSIRPEALHSPRAPLQPQQIEVRAPQRASTPQPAPAGVPALASQHPPEEEVHYHLPVARATAPVQSEVLVMQSEYRLHPYTVPRDVRIMVHPHVTAVSEQPRAADGVVKVPPASKAPQQPGKEAAKTPDAKAAPTPTPAPVPVPVPLPAPAPAPHGEARILTVTPSNQLQGLPLTPPVVVTHGVQIVHSSGELFQEYRYGDIRTYHPPAQLTHTQFPAASSVGLPSRTKTAAQGPPPEGEPLQPPQPVQSTQPAQPAPPCPPSQLGQPGQPPSSKMPQVSQEAKGTQTGVEQPRLPAGPANRPPEPHTQVQRAQAETGPTSFPSPVSVSMKPDLPVSLPTQTAPKQPLFVPTTSGPSTPPGLVLPHTEFQPAPKQDSSPHLTSQRPVDMVQLLKKYPIVWQGLLALKNDTAAVQLHFVSGNNVLAHRSLPLSEGGPPLRIAQRMRLEATQLEGVARRMTVETDYCLLLALPCGRDQEDVVSQTESLKAAFITYLQAKQAAGIINVPNPGSNQPAYVLQIFPPCEFSESHLSRLAPDLLASISNISPHLMIVIASV

SEQ ID NO: 80 - DNA, 1017 bp, Homo sapiens
ctgcagattagacaagagaatttcacaagtgtgatagccttctgtatattatataaaagtttgggtatactgtctggccaaaccagcttgctccataagtcattaaccaaatccattataggtaatttgttcagttcaatgtttacaattcttatggaaaaaattagcaacacacacatttaaaacgtgttcatttacctttgcgtgagtgcttaaaatacatatttctatttcaagatgacatttaaaaattattctaatatatcagcagcaaaaatataatttgcaattacaaaaaactaaactagaatccttaagttattctcatgtttacagttgtgattctttaataaatactattatgcagctctattgtttaagctttctggatttggtttaaacacatgcatatatattgtcaattgtgggaagctttacaagttatattccatgcactttttggacagagttctaacagagccagccagtccacaaaacaggcagacaaaagttgaattaactggggcaaataggactcttatgcaacatccaaaatatctgacattctgcagcaaacagggagtaccttcaggattggcctgttatcttctttagaactaagttcatcttaaaaatttaagaaggtggaccatttcaaccaccatcaagtgcatttaggtgacatgttttagttaacttgacttccttgaattgactagttagtaactagtcactagtaattccgtcacaagcaatcagcttcaagaaaggagcatatcaatgccagttacatctaaaccttaaaattggttttccacataatgttccttatatagaattactaagcaggtctcaacagacagaagtttttcttaggtagttgccaattcgatatgatactaaagttgtctaaaatggtccagcttgtagagaatatttcgctctttacaatatggacctcgacgaggtattctccagacgttattacaccccccctgccgtctcctatttattttc

SEQ ID NO: 81 - protein, 93 aa, Homo sapiens
MSTDTGVSLPSYEEDQGSKLIRKAKEAPFVPVGIAGFAAIVAYGLYKLKSRGNTKMSIHLIHMRVAAQGFVVGAMTVGMGYSMYREFWAKPEP

SEQ ID NO: 82 - DNA, 5000 bp, Homo sapiens
gcccgggactatcccttcgcggtgtagcggcagccggagacctggctgaggaggcaaccgcgtagacacctccctgcttagaaaacaaacactgaaccagaccgatcccagttggagggttcgaaaatgttccagacagcctgtcgggaggggttgttgttgctgttggactaaatagctattcctgattggtcatgtatagggttttttaaggcgggtggggggaggagggggtagaggaaaggctccaaacacctgcaggttgggggcggaaagctgtttgcgattccctggactggttggtcggggacaggaggtaattcccagccattgacccccatttctctctctccctccctcttgccctgcctctttctctccacccctatctttcctggaaactcgctttgggcgcggcagatcgcccaggaccacaccgcagcgtaactgcaggcctctcagcgaaaaagggggaaagcaaagacccgggtgtgcatcctcttcctcggcttccgcccctttccggcggagtggagatcctattcagaggggccggtctctctaaatatgccccaggatgaccgagcggccgccgagcgaggcggctcgcagtgacccccagctagagggacgggacgcggccgaggccagcatggcccccccgcacctggtcctgctgaacggcgtcgccaaggagacgagccgcgcggccgcagcggagcccccagtcatcgaactgggcgcgcgcggaggcccggggggcggccctgccggtgggggcggcgccgcgagagacttaaagggccgcgacgcggcgacggccgaagcgcgccatcgggtgcccaccaccgagctgtgcagacctcccgggcccgccccggcccccgcgcccgcctcggttacagcggagctgcccggcgacggccgcatggtgcagctgagtcctcccgcgctggctgcccccgccgcccccggccgcgcgctgctctacagcctcagccagccgctggcctctctcggcagcgggttctttggggagccggatgccttccctatgttcaccaccaacaatcgagtgaagaggagaccttccccctatgagatggagattactgatggtccccacaccaaagttgtgcggcgtatcttcaccaacagccgggagcgatggcggcagcagaatgtgaacggggcctttgccgagctccgcaagctgatccccacacatcccccggacaagaagctcagcaagaatgagatcctccgcctggccatgaagtatatcaacttcttggccaagctgctcaatgaccaggaggaggagggcacccagcgggccaagactggcaaggaccctgtggtgggggctggtgggggtggaggtgggggagggggcggcgcgcccccagatgacctcctgcaagacgtgctttcccccaactccagctgcggcagctccctggatggggcagccagcccggacagctacacggaggagcccgcgcccaagcacacggcccgcagcctccatcctgccatgctgcctgccgccgatggagccggccctcggtgatgggtctgggccaccaggatcagccaggagggcgttcttaggctgctgggatggtgggcttcagggcaggtggggtgagaattgggcggctctgaagcaaggcggtggacttgaactttcctggatgtctgaactttgggaagcctttactgaccctggggctggcttttctgtttcctgtaccagtaggagatcagaaaaatggagcaaagtggtaggtactttttgtgaagacggcacggtcttccctcttccctcagtcccaaatccttcccaagtaagaggctggagttgtcactgcttttggcctggagtttgggatccctgtctttcctaagacctggggttgtcagctctcatctgaggcatccagcagtctctgccttgcctttagcccctcccaagctggctggggtggcctgtgtggccacttctgtccatatttataggtacccaatagctgcccatttcgtgagccccatcttcacccaggcctatgttgatccatccagcttgccagatgctgcagagtcacaagcctcgaggtgccttcttcagggcctggttgaagaagatgatcagtggacagtctgctctagatgagctgggccggagggtcaggaaacccagtcgcccttacttcttgccctggggatcaaagttctgctttctccccaatgagacttgccttcctaagcctgtggctgtggagaccatgtctgcagccctgagaaagccctgtcgggctttgtgtgaaggcagagaaagggacaatgatagtagagtgatatggagcaagagatattttgggcatgtgggcttcaactcctcgacatcactgttcatgctggcgagtgaatgccagtgtgctgatgggcgtacgctggtgctgagtagatgcgcagccccatctgtgcattctcctggatgcttagagggatttctttgctgtaagatgtctgtttgctgatggtctggtctatgttccgaattgagcacaaaacctgtcctatgaatgctttgcatttggaatttttgcttgacttcagttattggtggaatctttagcgctcaataggaccaggatccagcctcacttctagggtatgggaaatccaatcagagaccaggccctggctagacccaaacatatgcacattcacttagcagaaccttaaacacccctcagttgtgcagcttttggtcatcaagggtgcgtctgggaggttggtttaatgcaatagaagtgctcccctctgaaagttgtacatgaaatttttgtaaatcacatccttatccttcatcttttaaagaaataaccactgcaagtccttttgtaaagtgaagaatccttttgtagaatgaaccactgccccttcattgatttcctgtgtcaatccagatggtgggatgtggttttcttaaggtgaggcctgtctgtgacctgcatctaagcccatgggacaaattgcacagaagtcctgtatgtctgtcattgtacccttaagtcaccctagccctctccctctaggctctgccttcgaggtcagaggagagatagcctgtggccctgtcctgccatgcaagaactcatcactgtggctgtctggaaagcccccccttatagtttgggcttcagcctagtggcttgtcctcaccatgatggggccctaattcagccatgtacagacagagaatatgtctgctcctttccccttccttttaagtaaggtccaattctcgagcttggggcaacattgttcacctttgtagcactcaggctctccattcaatttcaggctccccagatcatgttttggtgaaaattagggttggttcctttccaacgtttggaagatcctgtgaggagccccatctgtctaaagatagagtcattgctgtaggatctaaggctgtttgcttcaccgtggattcgcttgagttaggaatgagaagtagccacagtatggatgggtggatgggttttatgagatggatcacatattttattaagaactcaaacttctggctccctcttctttcagacttgccatgtgactctggcttggcctatctcctagggctatggtgtggactgaatgggatcatgaaagtagacagttttgagaacgtaaagaactttttcttttccctcaatctcaatcctgcagtggggtttcgcagcctgagtccacgacctaggcagtaggccggtgtgcctgactgcccagcatttgggtaatttagattgtaaaccgctttggcctgagttattgagattgtcctcatttctccagattatctatttgtgtgtgtgtgtgtgtgtgtgtgagagacggtgtcttgttctgtcactcaggctggagtacagtggtgccatcattgctgtctgcagccttgaactctgggctcaagcaatcctctcacctcagcctcccgagtagggaggaccacaggtgtgagccaccacacctggctaatttttacttttttttttttttggtagagatggagtcttgctatattgcccaggctggtcttgaagtcctggcttcaggcaattctcctgcctttgcctccagaagcactgggatcacaggtgtcagccattgcacccagcccagattgtcttaatttctatcttgttccaaggccagggacagtaataagaatggaaaagagatatgggaacactggcagactgtgtaaaatgtaatgcaactacccaaaacaagcctggtaggaaagggcaagtctttaggtctttgtaagaactaaagaagatctgtaatttttattttcaccctctgtaccccatgaccttatccttcctctccttccttgttacccatgaaaaactggcaacattccaagaatagcatctgtacaaaggggaaagaacataaaggtaaaacaaaacaaaacaacattttgagaacaaagatgaccataaccactgaagggaatcacatcttttaagacaaattcatattcttttatttgttatggcagatgacaagatggtacaacctttattcttttccaaaataaaacaaagggcacagcatctgtagtcagccgacaactctttcggccttttgggggtgggtctggccgtacttgtgatttcgatggtacgtgaccctctgctgaagacttgccccctgcccgtgtacatagtgcattgtttctgtgggcgggcccagcactttccgtcaacgttgtactgtatgtgatgaattgcgttggtctctgcatttttctgcagaagaggagtaaccgctccaggtaccttgacctttgtacagcccagaggccaacactgtgggtgtgtgactctttagcaaaaaaaacccatgtggtgatgatgtgtctatatatgtgaggatgtatcgggaagatttctaaataaaagttttacaaaggg

SEQ ID NO: 83 - protein, 331 aa, Homo sapiens
MTERPPSEAARSDPQLEGRDAAEASMAPPHLVLLNGVAKETSRAAAAEPPVIELGARGGPGGGPAGGGGAARDLKGRDAATAEARHRVPTTELCRPPGPAPAPAPASVTAELPGDGRMVQLSPPALAAPAAPGRALLYSLSQPLASLGSGFFGEPDAFPMFTTNNRVKRRPSPYEMEITDGPHTKVVRRIFTNSRERWRQQNVNGAFAELRKLIPTHPPDKKLSKNEILRLAMKYINFLAKLLNDQEEEGTQRAKTGKDPVVGAGGGGGGGGGGAPPDDLLQDVLSPNSSCGSSLDGAASPDSYTEEPAPKHTARSLHPAMLPAADGAGPR

SEQ ID NO: 84 - DNA, 512 bp, Homo sapiens
attcttcccctctctacaaccctctctcctcagcgcttcttctttcttggtttgatcctgactgctgtcatggcgtgccctctggagaaggccctggatgtgatggtgtccaccttccacaagtactcgggcaaagagggtgacaagttcaagctcaacaagtcagaactaaaggagctgctgacccgggagctgcccagcttcttggggaaaaggacagatgaagctgctttccagaagctgatgagcaacttggacagcaacagggacaacgaggtggacttccaagagtactgtgtcttcctgtcctgcatcgccatgatgtgtaacgaattctttgaaggcttcccagataagcagcccaggaagaaatgaaaactcctctgatgtggttggggggtctgccagctggggccctccctgtcgccagtgggcacttttttttttccaccctggctccttcagacacgtgcttgatgctgagcaagttcaataaagattcttggaagttt

SEQ ID NO: 85 - protein, 101 aa, Homo sapiens
MACPLEKALDVMVSTFHKYSGKEGDKFKLNKSELKELLTRELPSFLGKRTDEAAFQKLMSNLDSNRDNEVDFQEYCVFLSCIAMMCNEFFEGFPDKQPRKK

SEQ ID NO: 86 - DNA, 591 bp, Homo sapiens
  misc_feature (467)..(467): n is a, c, g, or t
  misc_feature (481)..(481): n is a, c, g, or t
  misc_feature (508)..(508): n is a, c, g, or t
  misc_feature (529)..(529): n is a, c, g, or t
  misc_feature (559)..(559): n is a, c, g, or t
cagtagcacaccttttgtttattgacctatgtaaaaaaataataggtcttgaaaagtcagaacaataaaagaatatgcaaaaaggttatttctgattctagaaggctatacaaatatgcaaaaaaggaataagttatttttttttgcttgtcttttttccaaaattttttcccaaacttcatttctaattatacaaatgactaaggaccagtttaacaaatcgtttttatgtatatattacatgctttggaatatagatagaaaatgttccaaaaaagttgttcagaaacttttctattcacaatatgaacaagaaacttgtataaaagaagggggaaaggagcaccttttatgtaattttgaagcaaagatgacaaaaaagatcaatctggaatatggaaatcatttgctttaaaaaacaaacaaacaaaaccctacaataaaccatagctaattagttcttccanggaaagtttgaggnagtttagcctcataattaaatccccgnagcttgggactttttggcctngtgggggtttcctttttaaggtaacctggntttggacttggggacttggaacacttggggaa

SEQ ID NO: 87 - protein, 307 aa, Homo sapiens [sequence omitted]

SEQ ID NO: 88 - DNA, 629 bp, Homo sapiens
  misc_feature (305)..(305): n is a, c, g, or t
tcctgccacgtttcctttaatgatgctgactcttgtatcacacaggccagcatgaagtttcttactcagactttacaggcattttccgtaattcaatcagtcctgctcccagcacaacacaggaggtgattcgagaataatcgcgagaatcaggcctgcttggcactattacaactggggaaaacaaaccagggcgcctccctggttcccagcccagaatgtttctgttgggtaactgctttctaaaggaactgggatctgagggagttcctagacttggagcactaaagacacaagcgtggcgnggctggcagcgccgctcatgagcacccctctgcccttggtcctggcctggctgttacagggcctcgaactcgtcgatgcgctgcttggtgttgccctgccggatctgccgcagcgtcttgtacttgtcccggccttgcctcatgttctcgttgtggatgatgtcattgtggggtctcttattctcatctcgggccttgggacagttcgctgctcagcgttaagagctgccggttggacaaggctggtcttttctggcccagtgatgcgcttctcccattggggtaaccgggatgcctcaataaaaagtccgccttaacccgggg

SEQ ID NO: 89 - protein, 586 aa, Homo sapiens
MPKPINVRVTTMDAELEFAIQPNTTGKQLFDQVVKTIGLREVWYFGLHYVDNKGFPTWLKLDKKVSAQEVRKENPLQFKFRAKFYPEDVAEELIQDITQKLFFLQVKEGILSDEIYCPPETAVLLGSYAVQAKFGDYNKEVHKSGYLSSERLIPQRVMDQHKLTRDQWEDRIQVWHAEHRGMLKDNAMLEYLKIAQDLEMYGINYFEIKNKKGTDLWLGVDALGLNIYEKDDKLTPKIGFPWSEIRNISFNDKKFVIKPIDKKAPDFVFYAPRLRINKRILQLCMGNHELYMRRRKPDTIEVQQMKAQAREEKHQKQLERQQLETEKKRRETVEREKEQMMREKEELMLRLQDYEEKTKKAERELSEQIQRALQLEEERKRAQEEAERLEADRMAALRAKEELERQAVDQIKSQEQLAAELAEYTAKIALLEEARRRKEDEVEEWQHRAKEAQDDLVKTKEELHLVMTAPPPPPPPVYEPVSYHVQESLQDEGAEPTGYSAELSSEGIRDDRNEEKRITEAEKNERVQRQLLTLSSELSQARDENKRTHNDIIHNENMRQGRDKYKTLRQIRQGNTKQRIDEFEAL

SEQ ID NO: 90 - DNA, 2347 bp, Homo sapiens
attcggagctgcctcctcgccaatgattccagcgcctgacagccaggaccccaggcagcagcgagtgacaggacgtctggaccggcgcgccgctagcagctctgccgggccgcggcggtgatcgatggggagcggctggagcggacccagcgagtgagggcgcacagccgggacgccgaggcggcgggcgggagacccgcaccagcgcagccggccctcggcgggacgtgacgcagcgcccggggcgcgggtttgatatttgacaaattgatctaaaatggctgggtttttatctgaataactcactgatgccatcccagaaagtcggcaccaggtgtatttgatatagtgtttgcaacaaattcgacccaggtgatcaaaatgattctcaactcttctactgaagatggtattaaaagaatccaagatgattgtcccaaagctggaaggcataattacatatttgtcatgattcctactttatacagtatcatctttgtggtgggaatatttggaaacagcttggtggtgatagtcatttacttttatatgaagctgaagactgtggccagtgtttttcttttgaatttagcactggctgacttatgctttttactgactttgccactatgggctgtctacacagctatggaataccgctggccctttggcaattacctatgtaagattgcttcagccagcgtcagtttcaacctgtacgctagtgtgtttctactcacgtgtctcagcattgatcgatacctggctattgttcacccaatgaagtcccgccttcgacgcacaatgcttgtagccaaagtcacctgcatcatcatttggctgctggcaggcttggccagtttgccagctataatccatcgaaatgtatttttcattgagaacaccaatattacagtttgtgctttccattatgagtcccaaaattcaacccttccgatagggctgggcctgaccaaaaatatactgggtttcctgtttccttttctgatcattcttacaagttatactcttatttggaaggccctaaagaaggcttatgaaattcagaagaacaaaccaagaaatgatgatatttttaagataattatggcaattgtgcttttctttttcttttcctggattccccaccaaatattcacttttctggatgtattgattcaactaggcatcatacgtgactgtagaattgcagatattgtggacacggccatgcctatcaccatttgtatagcttattttaacaattgcctgaatcctcttttttatggctttctggggaaaaaatttaaaagatattttctccagcttctaaaatatattcccccaaaagccaaatcccactcaaacctttcaacaaaaatgagcacgctttcctaccgcccctcagataatgtaagctcatccaccaagaagcctgcaccatgttttgaggttgagtgacatgttcgaaacctgtccataaagtaattttgtgaaagaaggagcaagagaacattcctctgcagcacttcactaccaaatgagcattagctacttttcagaattgaaggagaaaatgcattatgtggactgaaccgacttttctaaagctctgaacaaaagcttttctttccttttgcaacaagacaaagcaaagccacattttgcattagacagatgacggctgctcgaagaacaatgtcagaaactcgatgaatgtgttgatttgagaaattttactgacagaaatgcaatctccctagcctgcttttgtcctgttattttttatttccacataaaggtatttagaatatattaaatcgttagaggagcaacaggagatgagagttccagattgttctgtccagtttccaaagggcagtaaagttttcgtgccggttttcagctattagcaactgtgctacacttgcacctggtactgcacattttgtacaaagatatgctaagcagtagtcgtcaagttgcagatctttttgtgaaattcaacctgtgtcttataggtttacactgccaaaacaatgcccgtaagatggcttatttgtataatggtgttactaaagtcacatataaaagttaaactacttgtaaaggtgctgcactggtcccaagtagtagtgtcctcctagtatattagtttgatttaatatctgagaagtgtatatagtttgtggtaaaaagattatatatcataaagtatgccttcctgtttaaaaaaagtatatattctacacatatatatatatgtatatctatatctctaaactgctgttaattgattaaaatctggcaaagttatatttactttaaaataaaataattttattgc

SEQ ID NO: 91 - protein, 359 aa, Homo sapiens [sequence omitted]

SEQ ID NO: 92 - DNA, 511 bp, Homo sapiens
gcggccgcggtcgggcagcgtgtccacgatctgctcaatggtcaccacgcccttggcagtcggtggcggggctcgcatggttgggggcgcattggggatccaggagcaccagtcgtactggccgaagttgaccgcggcgtgctgggcggaggcggtgaagatcaccacggtcaggtactccgacagctgctcccggctcttgaccgacttggggaagcctgaggacttgcggccccgcatgccgtacacgtagacatcgttcacgaagtcctgcagctccgggtcctcctccaccacctggtcgccctcgtagtagatgtctaccacctcggccgtgaacctggctcagggggcgcacgagggtgggcgacccagccaggtctgcggaggatgcccggcggcaaccccctcacggacgctgggactccccaccccgtccccattcagcgctagagtggaggggccaggccgccccaggtagtcaggcaggggtccggctcctccccaggac

SEQ ID NO: 93 - protein, 674 aa, Homo sapiens
MPSYTVTVATGSQWFAGTDDYIYLSLVGSAGCSEKHLLDKPFYNDFERGAVDSYDVTVDEELGEIQLVRIEKRKYWLNDDWYLKYITLKTPHGDYIEFPCYRWITGDVEVVLRDGRAKLARDDQIHILKQHRRKELETRQKQYRWMEWNPGFPLSIDAKCHKDLPRDIQFDSEKGVDFVLNYSKAMENLFINRFMHMFQSSWNDFADFEKIFVKISNTISERVMNHWQEDLMFGYQFLNGCNPVLIRRCTELPEKLPVTTEMVECSLERQLSLEQEVQQGNIFIVDFELLDGIDANKTDPCTLQFLAAPICLLYKNLANKIVPIAIQLNQIPGDENPIFLPSDAKYDWLLAKIWVRSSDFHVHQTITHLLRTHLVSEVFGIAMYRQLPAVHPIFKLLVAHVRFTIAINTKAREQLICECGLFDKANATGGGGHVQMVQRAMKDLTYASLCFPEAIKARGMESKEDIPYYFYRDDGLLVWEAIRTFTAEVVDIYYEGDQVVEEDPELQDFVNDVYVYGMRGRKSSGFPKSVKSREQLSEYLTVVIFTASAQHAAVNFGQYDWCSWIPNAPPTMRAPPPTAKGVVTIEQIVDTLPDRGRSCWHLGAVWALSQFQENELFLGMYPEEHFIEKPVKEAMARFRKNLEAIVSVIAERNKKKQLPYYYLSPDRIPNSVAI

SEQ ID NO: 94 - DNA, 534 bp, Homo sapiens
taggataacagtgtttttaatatttaagtaacaaaacattcaggttaatactcaatgcatatacaataagatagagcaacaacaacaaaattacaaagcacaatctaactatatggaggctttcaaacaattaaatgttggatagagaatgcgctaattaaaaacccagctgagccacaccgcactacctgagacctgaccagggactttctggtggtagaagggagagctcattgtgccctgtggccttcaactcaaatggatgctcttcaactcaaatccagagagcacttaacaaactccatgctctagattgctcaaccctcctccttgcttttcttttttctttagttgacttgtctgctcatcctttacccaaactgaggcagtgagttccacaaatacttcctctggtttggtttaaatgttgctgtctcagtgagaagggcctctgagctcactgctctgactcttgaacacaacttgttatttaatggggcataatccgttctttccccagacatagtctgttca

SEQ ID NO: 95 - protein, 261 aa, Homo sapiens
MSTTTCQVVAFLLSILGLAGCIAATGMDMWSTQDLYDNPVTSVFQYEGLWRSCVRQSSGFTECRPYFTILGLPAMLQAVRALMIVGIVLGAIGLLVSIFALKCIRIGSMEDSAKANMTLTSGIMFIVSGLCAIAGVSVFANMLVTNFWMSTANMYTGMGGMVQTVQTRYTFGAALFVGWVAGGLTLIGGVMMCIACRGLAPEETNYKAVSYHASGHSVAYKPGGFKASTGFGSNTKNKKIYDGGARTEDEVQSYPSKHDYV

SEQ ID NO: 96 - DNA, 1831 bp, Homo sapiens
ggggaggccagctgggaggggagggggccgtgggggcggctcggcggaaccagccccggctgggcagcagcggggacgccgggggccggggccagggctttccgggcttcggtgaggccgccgtgggccccatcttccggcggtcgccggagtttgtggtgattgttgctgccgccgccaccgccccggctgccatctcctcctcctgggccgccgcctcctcctcttcctcctcctcctgggccgggctgatcccctccccgctgccgcctcctcctgggctgggcccgcggtgtctcgtcccctcgcggagccgctcctgccgccgccgccgccgcctcctcattcatcctcgtgcaccataggcggcacaggcaccaagatgtccaaccgagtggtctgccgagaagccagtcacgccgggagctggtacacagcctcaggaccgcagctgaatgcacagctagaaggttggctttcacaagtacagtctacaaaaagacctgctagagccattattgccccccatgcaggatatacgtactgtgggtcttgtgctgcccatgcttataaacaagtggatccgtctattacccggagaattttcatccttgggccttctcatcatgtgcccctctctcgatgtgcactttccagtgtggatatatataggacacctctgtatgaccttcgtattgaccaaaagatttacggagaactgtggaagacaggaatgtttgaacgcatgtctctgcagacagatgaagatgaacacagtattgaaatgcatttgccttatacagctaaagccatggaaagccataaggatgagtttaccattattcctgtactggttggagctctgagtgagtcaaaagaacaggaattcggaaaactcttcagtaaatatctagcggatcctagtaatctctttgtggtttcttctgatttctgccattggggtcaaaggttccgttacagttactatgatgaatcccagggggagatttatagatccattgaacatctagataaaatgggtatgagtattatagaacaattagaccctgtatcttttagcaattacttgaagaaataccataatactatatgtggaagacatcccattggggtgttattaaatgctatcacagagctccagaagaatggaatgaatatgagtttttcgtttttgaattatgcccagtcgagccagtgtagaaactggcaagacagttcagtgagttatgcagctggagcactcacggtccactgaagctctgaatcctcagggatgccacctgcacattctcatactctgtccggggtcccagcctagcctttaccacgatactggtcctggtttggggggattctgaaacctcaaactaatagaactttcttctctttttttctagtaggtgtagtccttccttaatttcaactcattaaaaaatgctttatagtttagggcagtggaaggaaggctggcatcaaaatattttgatcaaaaaagatgacaatgtaaaggctcagttgtggcagacagttttttgaaagtaacttgtaaagcatttaccatatcctaaatttgcactctttgcagacttgtgcacatatattccgctttcagaatagttttgcaaattgtacacaaacaaacaaaaaggtggaagctttttaataaagaaattgcatttataaatgatctgtattagaatataataaatctccagttatagtcaattactacccatgttgtacaacagataccttctattttagttgctaataaagggctacacaactcaaaaaaaaaaaaaaaaaaaaa

SEQ ID NO: 97 - protein, 297 aa, Homo sapiens
MSNRVVCREASHAGSWYTASGPQLNAQLEGWLSQVQSTKRPARAIIAPHAGYTYCGSCAAHAYKQVDPSITRRIFILGPSHHVPLSRCALSSVDIYRTPLYDLRIDQKIYGELWKTGMFERMSLQTDEDEHSIEMHLPYTAKAMESHKDEFTIIPVLVGALSESKEQEFGKLFSKYLADPSNLFVVSSDFCHWGQRFRYSYYDESQGEIYRSIEHLDKMGMSIIEQLDPVSFSNYLKKYHNTICGRHPIGVLLNAITELQKNGMNMSFSFLNYAQSSQCRNWQDSSVSYAAGALTVH

SEQ ID NO: 98 - DNA, 782 bp, Homo sapiens
  misc_feature (528)..(528): n is a, c, g, or t
  misc_feature (569)..(569): n is a, c, g, or t
  misc_feature (606)..(606): n is a, c, g, or t
aaatggctaatagatttaatgcagagtgtcaacttcaattgattgatagtggctgcctagagtgctgtgttgagtaggtttctgaggatgcaccctggcttgaagagaaagactggcaggattaacaatatctgaaaacacaagtaagagaaaataaaagggtcaattgacatccagcaaacagaaaggaataaaatgccaaaagcagtgtcttggcacactctccacatcattctccaacttgggccttcctagaatcatccagctcctcatcccagccccataagccccagatgtccccactgaaaccaaggcagatacctaaaatctcacttgtaggagaaaccacaggcaccagagctgccactggtgctggcaccagctccaccaaggccagcgaagagcccaaatgtgagagtggcggtcaggctggcaccagcactgaagccaccactggtgctggcactggcactggcactgttattggtactggtactggcaccagtgctggcactgccactctcttgngctttggctgtagctactgctcccgcctggatcctggcttntgcccagggtccgatatcagctacgttccagatgcanggcccggcagcattctccgagccgagcccaatgcccattcgagctcttatctcggtcctagcctttgcttcagctgcagcctcagctgcagcctttcaatccgcttccatcggctgtcggtactgagctgcccattcgctgggatgctgcttttgtaccttgcgggcaacttgaag

SEQ ID NO: 99 - protein, 606 aa, Homo sapiens
MSDTSESGAGLTRFQAEASEKDSSSMMQTLLTVTQNVEVPETPKASKALEVSEDVKVSKASGVSKATEVSKTPEAREAPATQASSTTQLTDTQVLAAENKSLAADTKKQNADPQAVTMPATETKKVSHVADTKVNTKAQETEAAPSQAPADEPEPESAAAQSQENQDTRPKVKAKKARKVKHLDGEEDGSSDQSQASGTTGGRRVSKALMASMARRASRGPIAFWARRASRTRLAAWARRALLSLRSPKARRGKARRRAAKLQSSQEPEAPPPRDVALLQGRANDLVKYLLAKDQTKIPIKRSDMLKDIIKEYTDVYPEIIERAGYSLEKVFGIQLKEIDKNDHLYILLSTLEPTDAGILGTTKDSPKLGLLMVLLSIIFMNGNRSSEAVIWEVLRKLGLRPGIHHSLFGDVKKLITDEFVKQKYLDYARVPNSNPPEYEFFWGLRSYYETSKMKVLKFACKVQKKDPKEWAAQYREAMEADLKAAAEAAAEAKARAEIRARMGIGLGSENAAGPCNWDEADIGPWAKARIQAGAEAKAKAQESGSASTGASTSTNNSASASASTSGGFSAGASLTATLTFGLFAGLGGAGASTSGSSGACGFSYK

SEQ ID NO: 100 - DNA, 43284 bp, Homo sapiens
aagtagctgggactataggcgcctgccaccacacccggctaattttttgtatttttattagagacggggtttcaccatgttggccaggatggtcgtgatctcttgaccttgtgatccacccgcctcggcctcctaaagtgctgggattacaggcgtgagccaccatgcctggcctactataagttttagatagagattgcaaactcagatgccaacaggagccaggactgctgagggaccaggtgttagaagaccaaccccaagctctccccattcctttctgggagcagctggagctcagaagcaactgtcaccaccgtggggcgtgaatctcccggctgtcacagaccttactctgccctagagtctcaccaacattgaggctgagtggcactcacctcctgtcaacacccctgcacgtctgctttccttagagtagagagagatttctctgtaactgatgctccattaaaaggggggagtcctaagtgaggtcccaagagggccatggattttaagatcaagtgggagatgatgtatttcttttcttttctttttttttttcggagacagagtatcgctctgtcgcccaggctggagtgcaatggcgcgatctcggctcactgcaacctctgcctcccacgttcaagtgattctcctgcctcagcctcctgagtagctgggattacaggcgcgtgccaccacacatggctaacttttgtagttttagtagagacggagtttcaccatgttagtcaggctggtcccgaactcctgacctcgtgatctgcccgcttcagcctcccaaagtggtgggattaccggcgtgagccactgcgcctggctggtgatgtatttcctattagctcaagtgtgtgacatcaaacaataaaactgagggacctgctgagaacctgacattgtatggggcaggtggactccagagccagagagctggggctctgatctgcccctttggtaattcaccaacccccttagagtcagtttcaaggaagacccccatctccaggaaaggaatgtgccatctacccctcagagtcattgtgaggattaaatgagacccgcacctgccatcttgcagatgctcagcaaggacaaactattatggtggttgtagttgtccacaaggctgagagagggataatttgtccaggatggacagtcactgttctgccctgccagccgggggtcctggggtgactagagtgtcagtggcttccacagagtgtaagtccaccctgccctcagaatcagtgtgacctgccaggtgagagcttggaaaccatgaggtgacctctcaggccagaacttgaccctttatcagttgtattaataaaaactaacttttttttgagacaagttctcgctctgtcatccaggctggagtgcagtggtgcagtcacacttcctggcctcaaccgatcctctcacctcagcctctcgaatagctgggactacaggtgtgtgccaccacgcccagctaattttttgtattttctgtagagatggaattttgccatgttgctcaggcttatcttgaactcctgggtcaagcaatctgcccactttggcctctcaaagtgccaagattacaggcatgagccaccatgcccagccaacaaaaactagtacttttgaatgcctactacaagccagggactatgagtgctttacacataagaactcacttcaactccacagcaaccccaggagcaaggtcctgctattagtctcattttacagaaaaagccgccgaggcacagagatgagaagtgacgctcctgagttcacacaggtgggcagtggtagaactggggtttcaaagtttatgttcccccctcctggatgtcaacacacctttctggacaggacccatgctctgaagctgggaattatttggtggaagtgttcaaattctccaggcatagtggctcggcctgtaatcccagcatttgggaggccgaagtgggaggatcacttgagcgcaggagttcaagatcagcctgggcaacatggcaagacccctgtgtccaggggggaaaatgtgttcaaattcctcagtacttgccaatatatttttaaacaatgaggctttccttccctccctctcagctgattataaaagtagtatatctttattgaagaggaaaatatgcagaaatcagtcatgctccctgcacccagccctcagggtggctaagattagcggtgggccctctcgctcacctgcagccaccacatcctggctgtgtgggtggacgtgtgcgtctcctctccccggagtcggagctgccctggcccaggtttcagcctctctggctgcggcttggctgggctggcctcactggcaggcattttggagacagttcagacatcgcgagtacacattcctcagcttcgcctcacactctccaccagattggtattaacgctgggagcgtaaaattggaatcggctggaggaaggggagtcggcactttcgtctgagttttacaagcatatgtgctggctgagccaggcctctgaggctagagcccttggcatatgcttcctggcccatttcccacccacccacctctacacacacacacacgcacacatctgcacatacacacacacacacacacacacatgacgtggctgattcagcctttcagccctgctacagccagaaccccagggtggcagcagcacgagagaagcctccatcttgggttcacccaatgtcgttttgctaaggatacactcactcactcattcactcattcattcattcatgcacgtgtgcatttatgcatccgccacccatatgggccctgtctcctggaccaggctctggtcttggcctgtgagcagtgctgactcagcagcttctgttttagaacccacattctaaagggcgtggaccatgaatagataagaatttcagagggcaatgagggctgtgaagaccaggaatctgggtggctccagagtgcctgccggggctatatgagatcaggtgctcagggacagttagatggaagccagaaagacagactcggcgcagtggctcacccctgtaatcccagcactttgggaggctgagtcaggtggaacacctgggatcgggagttcgaggccagcctggccaacatggtgaaacaccgtctttattaaaaatacaaagttagaacgggtgtagtgcctcacacctgtaatcccagcagtttgggaggctgaggcgggtgggtcacctgagattgggagttcgagaccagcctgaccaacacagagaaactccgtctctactaaaaatacaaaattagctggacgtggtggtgcttgcctgtaatcccagctactcaggaggctaaggcaggagaattgcttgaactcgggaggcagaggttgcagcgggccaagatcacgctattgcactccagcctgggcgacagagtgagactccatcttaaaaaaaacaaaacaaacaaacaaacacccacacacacaagcagggccacaccccatggagaaaggagagcagggcgctataggcagggagtggaggtgcagaggccctgtggggtgaggctgggcactttaaaggaaccaaagggaagcacgtggagggaggagggaaggtagggctagatggcaggaggcctgacaggtcttgggaggactgcatttcatggtattattgaaggagaggctttcccagaagcagccagcactgaggtgtcctcattcctgttcctggtatgagaaaaatcttttctattttactaatggaacaaagcaggccacagaggtgctgccttgtctgagatggcactgtagtccccacctctgctgcctttagccatgtacacacgtgcatacgcacactaacacatgcccatacatgtactgagcacagagacagtatgaaaagacagacaccagaggtcacaaatgggtgagttacattttactgggcctgaacagtatttttttttaaagtgtagatttattgctaacattgaataaaacaagatttttcgtaaaatctgaatgtcctttttaaaatgatagtgtctgagatttgatgggctcttaatatgtactaagcactctacttgttgaataaggttagtgtttttgttttttgaaatggagcttgccctgtcccccaggctggaatgcagtgtcatgatctcagctcactgcaacctctgcctcccgggttcaagtaattctcgtaccttagtctcccgagtagctgggaatacaggcatgcaccaccacactcggctaattttttttgtatttttaatagagatggggtttcgccatgctggccaggctggtctcaaactcctggcctcaagtgatcagcctgccttggcctcccaaagtgctgggattataggcatgagagctattccacctggccaaggttgatactgtttttaatccccatttttcagataataaaatggaggctgatagaagttaagtaacttgccaaaaggcacacaagtaactgttgagaggtagaatttggattctaatccagagagtctgatcatagctcactgcagccttgaactcctgggctcaagtgatcctcctgccccagcatcctgagtagctggaactacaggcacatgccaccatgcctggctaatttttcaattttttgtagagatggggttttaccatgttgcccaggctggtcttaaattcctggcctcaagtgaccctccctggcttcagcctcccaaagtattgagattacagtcatgaggtaccatgcccagccagaattctttttttatttattttaattttatttatttttaagtttttaaactttttatttgcatatttaaaaaattgtgcattccaataattaaaatcatttgaacaacaagaaaaaaatggcactctgattaaactgcattacagcctgcaggacaccttgggccagcttggttttactttagatttcactgttgtcccaccccacttcttccttcaccaacatgcaagttctttccttccctgccagccagatagacagatgggagaggcagtcgcggccttcgttgtcagtagttctttgatgtgaaaggggcagcacagtcatttaaacttgatccaacctctttgcatcttacagagttaaacagctaaaagaagtaaaataagaaggcaatgcttgtggaatgtacagtgcatattgacggcacacgcctcattacgattcgcctgcttgcttctcctgttcaatcgtttctttggaaggcagtggatttttctcttgcgtctctgtcttcttcagtttcgacttatcgaatttctcgatctcagccatatcggatttgtcagacatggttacggaggagaagcggagcgaggcacgcgagaacgagcgaagtctggtctgcgtagtggccaccactgagttgtccaattttatttatttttttgagacggagtttcactcttgtcgcgcaggctggactgcaatggcgcgatctcagctcactgcaacctccgcctcccgggttcaagtaattttcctgtctcagcctcccgagtagctgggattacgggcatgtgccaccatgtccggctactttttgtatttttagcagagacgcagtttcaccatgttggccaggctggtcttgaactcctgacctcaggtgatctacccgcctcagcctcccaaagtgctgggattacaggcgtgagccaccgcacccctttttcttcttgaaactggcagctctgcacttgaggcctggagctgagtggtccctgtgggcctggactcagctttctggttgaccctgcttcccattaggccccctttacctgcttgtttcctgccaggcccttggtggcttctgagttcgaatatacagcacatccactattaaaatgagcaattgtgtgtccttaacgtagatgaaaagtacaaataaataaataagcatttgggctatttctataaaatcaacttttaacaaaaaaggctttgaaatctgatgaatgtgccctgagacccccgcccctgcccctgccacttcctgactttgtgactttgagcaggtgacccagcctctctgagccttgatttccctcccctctaaaatggaggctaagaacagggtccctatggggaaaaagcaagaggccaccagcgggagctgtgaccgttgtcagggtttctgcaggtgcccctccagctaagcaggccctgctgccttgcagggagccccattggagggaggctggtcgcagtgatgaaaggcctggagtccccaccagcccagggagtgtggccaggaatgggctccagcctgcacagatgcggcatcatggcttctccgtgtccctcaggccttcgtcaagatggttggacaccacgtcgccttcctggaagcagacgtgcttcaggctgagcgggaccatggggccttccctcaggccctgcggaggtggctgggatccgcagggctcccctccttcaggaacgtgagtatcctgccccgagaagtgaggggagggcctctcccccttcgctccgcagaccccagcgtggggaggagcatgcaggaagcagagttcaggggggcacatttcacttctgcagacaggaaacgggtacaggcggccaggcacctcagcctttctctgtcccctgtgagccctgggctgtgacggttcgtgtgctcatgtaccatttattgggcgcctactgtttgctgagtgccatctgaggttactgtggtgagcagaaacagctcccgccctcctgcccatccttgcacacttagggacagtgcccaggatgacatctagaattccggccaggttgcccttcctgaggcaggagtcagcctcaagctggcccaacaagccggggaagggggacgggcgtccctcctgcatatggctctttgtggcctgcaaaggctgttctcttcctcatctctcctctgtcttcctgggatcctctccgtggccccgcaaggaaggaaggatcatgtgtcctttttgtcttgttttgaaatggggtctcactctgtcacccaggctggagtgcagtggcgtgatctcagctcactgcaacctttggcctcctgggttcaagtgattctcctacctcagcctcccaggtagctgggattacaggtgcacgtcaccatgcccagctaatttttgtatttttagtagagatggggtttcaccatgttggccaggctggtctcgaagtcctgacctcaggtgatccacctgccttggcctcccaaagtgctgggattacaggcatgagccaccgtgcctggccaatcaccctcagtttataggtgagaagacggaggctcggggaaggagataaggggacttgtctgaggccacgggcctggagcgcctgtttctggtgacttgcccccttcacaggaaaggtgtcacctagcggggcctcttgtggctccttgggctctgcctgcaggtatcccctctactgccctgtctccactgttcctacctgtccacaccttatctccactttatcacagcagcccatttagtgagtgctttttgtttttgagataggatctcattctgtcacccagactggaatgcaggtgtgatcctagctcatcgcagcctggaactcctgggctcaagtgatcctcccaccttagcctcccaagtagttgggactgcaggcacgcaccatcacacctggctaatttttctttttgtagagacagaggctcgctttgctgcccaggctggtctccatctcttggacttcagcgatcctcctgccttgacttcccaaagtgctgagattacaggcatgagctaccatgcctggccttattgagtgcttacaaggttccaggctctgcgttaggcattttatatgcagtaattcatttatctttcccagccatcttgtgtgctgggtactaacagtatctccatttaacaggtgaggaaatgaaacttcagaaagtgtcaggggttctgcccgtgggcagaatttggcccatgtcaactcattctatttggccaggcaatgtatttaaacattgtgacttgaaatgcctgatagggcatgtgctttccagtcacaggctcctggcctcattgtacctgcctgaggcatgtgctgttcacctgcctgaggcatgtgctgttcacctgcctgcttccaggtgagtgttttgcccaagcttgtaacagctggacagtggcctcccagatctcatggtctaggaactcctcttgctccttcagagaccaagttaaagacatctcctgtgagaagccctctgggattgcccctcttcagacaaactccatttctttgctttccaaagacaatgaagtcatgaactgcatcctttgtcctctccctcaacttatggtgaccattcccgagtgacatttcccactgacggctttaaaagcacatttggggccgggcacggtggcttatgcttgtaataccagcactttgggaggccaaggcatgtggatcacttgagcccaggagttcaagaccagcctgggcaacatggcaaaaccccatttatacaaaaaatagaaaagttagctgggcatggtggcgcatccctgtggtctcagttactcaggaggctgaggtgggtggatcacttgagcctagcctgggaggtggaggtttcggtgagccgagatcgcatgactgcactcagcctaggtaacagagtgaggccctgtctcacaaaaaaaagcacattaggggccagatgtggtagctcatggctataatcccaccactttggggggccaaggtgggaggattgcttgagttcaagaccagccttggcaacaaagcaagaccttgtctctacaaaaaagtatccaagtgtgatggcatgcacctgtggccctagctactcaggaggctgaggtaggaggatcacttgagcctaggagtttgagactgcaatgaaccatgatcatgccactcactacactctagcctggacaacagaacaagaccctatctctgaaaattaaaaaaaacaaaaaacaaatttaagacacatggggggcagaaaggacacaggaccttggctgcccatgtcctgttagaacccaagtatcctaacagtgggtcctgcctgtcatttaatacacttcttgcagtctgcacagtcatcccgatgaggttggtgctagtgttcccatttacagaggcagagactgaggcttggagatggagaatcacctatccagagtcactactgggtttggaatccaggcctgtggggtgtgaaactgaggtccccccagcactcctgctgcagggatgtggcatccccccccggggtgtggctggggcatgctgggacctgcaccctctcctctccgccacactgggccttgctaagccttggagagccccctagacctacctgcagtgacttgttccaggaagcgcgtcctggccaggggtgggtgagtcattcagcaaccccagtgtgttgttcttggccccacaagggctttgtctgggggaggtggtgcagcctagtgtgtgcgtatgtgtgtgcagacctgaaggctccagggctgtggctgctccagggtgtgagctggaggggcccttgcagaatgatgatcatcaccgctggtgttggggccgactctgtagtcgcctcacaccccaccctgtgaagagggtgtggtcattgttcctgttttacagatgaggaaaccgagtcactgaggggttaagttgcttgcccacccagaaaatggtggagctgggatttgaacttgtgatgtctgggcccagagctggtgccctgcaccccattggtccattctatgccctccctgaccgccggacctgctctctgggaggtgagagtcctcgtagggtgcccaggcattctcagtgtcttccatcttgattatttcaaagctgggattttgtgccatctgtagtcagttcccctcagcgcctcctcccccagggtggacacctcctttccttgaccctgaagggccatcaccctcagaggctgacattccagtctccaccaagggcttggatctccaccaagcccttctcccggggcctgttccaatgcccggcataggtctgagaggcccaggcagccgggggctcggagagctttggtttctctcctggtctctcccccaggaccccactgcccccctgaggcaggtgtttgaggcctcccccgaccccaggctggcccgaacagtgaccatccagacgcagcagccagtcagggtgacctggccatgtggcgcccctgggctgtctgttcctcacccacccgtgctgcctccaaagggtccatggagtggagagggctgaggtgggacaaggatattgggtggccccacgggaatgctggcatgggcttctgcccccatgggaggagccacaccactcaccagaggcgcagcccccagagagggcaggctgcccgctgcccaggtgacttggtgctggtgtggacattgcctgtggcctgggctggcccgaggggtccggtgcaggaagtgacctgtggatactagcgatccccctcagccagctttccgactggatcctggcctctcagccctacctttgagctgcctgagaaagaggcatttgctccacagacggagccagcctgtgccccaggcccttggcacccagccacaaaaatgtacgcatgaccatgctacaacacatgtatttcatggcacaaaagtccacattttcatgctgcactatataaacgaaaagtttttagttatgcttttatattgatcgttataacattgtgaggttttaataagaattgcccctctcttttattgtagctaagccccttctgtgacatgtcttagctgtgtgaccatgggcaagtctcttagcctttgtaagcctcagagacagccaggcacagtggcttccacccataatcccagcactttgggaggccagggtgggaggatcacttgagctgggaactacatagggagaccacgtctctaatttactagatattattaaaataatacctttttgagatcttaacgttattttgaattgttccgagatggcttctcagtgacctcagaataaaatccaaactccttgtcatggcctgcaagagggtgcatgatctggtcacgttcagtctctctctcttttttttttttttttttttttttttgagacagtctcactctgtcgcacaggctggagtgcagtggtgcaatcttggctcactgcaacctccgcctctcgggttcaagcgattctcctgcctcagcctcctgagtagctgggattacatgcacccaccaccacgccaggctaatttttgtatttttagtagagacagggttttgccatgttggccaggctggtctcgaactcctgacttcaggtgatctgcccacctcggcctcccaaagtgctgggattacaggcgtgacccacgacgcccagcttaaaataatatctttaaagttcaaaaaaaaattaagcctcagagagtctgactgagtcagtgagccggcacgggcaggttcatgagaggctttgcttgctagaaaactgtttggatttgatggaaaatgatgagggcccacgctaaagcagaggaggaaagctccggaactctcaggagggattccgagcatggagcggaagagcgtcggccacctgaaaagccagccggtagagtgatctcagctcactgcaacctccgcttcctggggtcaagcgattctcctgcctcagcctcccgagtagctgggattacaggcgcgcaccacaatgcctggctaatttttgtatttttagtagagacggagtttcgacacattggccaagttggtctcgaactcctgacctcaagtgatccacccacctcggcctcccaaagtgtcgggattataggtgtgagccgctgcacccggttgaaaagccagctttgcttgtgaggaatggagtggtccaggacagactcaacacttagtgctcagcggtgagcgggaatcacggggcagctgacagagccagccctgctgtgccaggcactgttttcagcttgtcaatcctcataacatcccacaagggaggtgctatttctatctccatcttacagctgaggaaactgaggcatagagagggtaagtaacttacccaggatcacacagttggacatgaggatatgaatccacgttcttctttccatcacatattgccttggtagagagctgtgatctcttcagggagcttgtgtctggtgcaagaatacagacagtgaccaaattcaaagaaaattcagttacaggtgggacacggtggctcacgcctgtaatcccagcactttgggaggcctaggtgggtgggtcacttgagcccaggagttccagaccagcctgggcaatatgcgaaaccccatctctaccaaaaaaaatacaaaactttgccaggggtggtggtgcatgcctgtattcccagctactcaggaggtggaaggatcacttgagcacaggaggtcaaggctgcagtgagccataatcgtaccactgctctccatcctgggaaacagagcaagactctgtctcaaacaatagcaacaacaacaaaaaaaaacagaaaattcagttagatggctgtttctaaagggggccctttagctgggcatggtagtgcgtgcctgtggtcccagctacttgggaggctggggtgggaagattgcttgagcccaggagttcaaggctgcagtgagtcgagattgcaccactgcactccagcctgggtgacagagtgagaccctgtctctgcaaaataaaatgtacaaaaaattaaaagggatcccaggtctgaggggtcaggagtggcctctgaggaggggctgtggaagctgagagctagatgatgagtaagtgtgggtgtggagtcagaagaaagagcgctcccggccaagggaactgccattgcagaatctctgcaacacacctgagcttggtgcttgagaaattgctagtccagcgtgggctgcctgcatgagccagggcagagtggagagagagaaggtctgggaggtagcagggaccagattgtgcagggtctcaaggccacacagaggaatttaacactattctaagggcgattcttgtagcaggggagggacttggccaaatttgcttcacttggcaagaaaccagggctcgttctctgctctgagctcaggctggcattcggggtctgtgacgtcttaggacttgaacaccagagctgagcagggcacgtgggtgccctccaggctgcaggtttggttgtttggaatgtttcctcccctggaaatatctaatgctgtgccctgagctctctggaatcctccccttgccaggtctcagggcccttgtccggtcagaggaaagaaaagagtctccagaaaggggcccaggtcttccagacaaatgtccctgagaccctgctagagggggcagccatcagcccagcgcctgcttgcggagggcccctcacatctggagatggtttcaggcatgtgcggaagtgaaagtgtgaaatggggctggagccctgcgggctgcggacctcggaagtgcacagaggccacagcaggtgtccccttggccgggccagcttcctgctgaccatgccaggccggccctcctcctggctcacgtgcccaggggcacagagcagcctcactaatttgttgtaaaccactgtttgttttctgccgccaaaacatcttgttcacgaggtgtcattttgattaatttttctgatggagaagaacacggtgcttcccagggaagctctttggctgacagcaaagctgactgggccaactcctgactcctgcacagagcgatgctgccctgggggagggaagcttggctgggactcggggctgcctggcccacctgttcacccctacccccaccagggcagcagaggcctggggagaccgtgcttgctgagaccttcccagaaagaaagatgggcagaggggctggaggggagccagggtggctttggagcaaagcagagccaggacaggcagggtgtgagatgtcacctggtcccacagttgcagcgctcccagggtgatctggtaacagcaatgagtgagtgagtcttctgggcatgagacaggagggagtggtggggactgtggcgaattgcagaccccatgcctcgtgtacaggagtggaacctttgcctggcgccagcctcgcataaatggcggccagtggtcaccaggttttcctatatgggggagaaagctggacatttggagggttttttgttgttgttgttttttgttttatgaatcttcccatgtcaaaaagtcagtatttttctaactgttgaatactgtgtggaaaaacatgttgtggctggagcagtggctcacacctgtaatcccagcactttggaaggccaaggcaggaggatcacttgagcccaggagttcgagaccagcctgggcaacacagtgagaccctgtctctattctaaaaaattaaaaataataaaactgtgttgtaccatgggctgcagccagcatagccccagctctggactttaggctgatgacctgtacctcttcgtcccctccactgtggaggatttgagaccagggagaagtagagcggcatcttctccacttttatgcaccagccctggttggaactcttcaactctaaacagcaacatgactaacagccaatagttatattgagcccctactgtatacgaagggctttctgtgcctcatctcaatttcctgtaacaacaccagaggcagatgctattattctagtttacaaagaaaggacctgaggctcagagggggctcttcacttgctcagagtcacacagtgtaactggcagagctgggatttgatccagctttgaccttggtcagctggtcaggtgtgtctctacctccctctgtgagcttcccaagggcagggactgaaacttcaactgccaaggctgcaaactcgagatctttgggctagttctgcctcaaccacacttgctcttcggccagcgtggtatatggatatatttaacttgagttagttgccaaaaagcaaatttcatgtgagatttttgaggatgagaggggaggaagttccttctgacagcaagtagtttttatttgggggggttgctctttgttgaggcctatctggaagcaccccaactttgcccttgtggcttctcatgaagaagcagaggtttgagtgggcccctgagcggcgtccctgcccagccagcatctggcctaccgtgctcactcttggtgcctgctggtgtgtttgagtctcccccccggtagagcacatagtaggtgttcaataaatagtcatcagcagatgttctgaaggcttcttgcctgcctcccagatttcttagggggcgtgtccaggcactggaaggctggagaggattttcaaggctgtaagggaggtaatgaggccatgggcggagctgccctgcccgggctgcctgtaggagtcgtcagtgccaggctcagcgtgctcccctccccagcgacccccccagctcccgccccttgcctcctctccccttcctgtccagccctgcaagtggtggggggtgctgggtctctcccctgcagaatccccctgcaggaggtgactcggggagggagcccgacagctcagctttatctggtggtggaggctgggtaagacacaaacaagaagggagaggaaattgtgaggcgccttctcccggccctgaaccagccactgcttctcctgctgcccccatcagcccttgcagtaaaaatgcagcaggagcagatagcaaatatgaggaccacgactgtggagggccgaggggtgccgggtcccagcccccacctaccagccccctccccacggctcccagggacctcccgggttcgtttccttcaaggtctttggtggagtgctatagggggacggagggttcctggcaggctggtttgggaatcaaattgtgtttttcaggcatttcattcttgctgagattttgaggatgagaggggagaaagttccttccgacaacaagaagttttcatttttgggggggtgctgtttgttgggccctatgtggaagcaccccaactttgccctggttggtgggaccctcaacatgcccttctctcaaagcagcaccaccgtcaggggcatcccctgtggcagcagtgccctgggcccagccctgccatcctggggttgttggacattgtttgcggcctttgcacatgccggttcccctccctggaaaacccttcccgctccccacctggcaatgttcattattgttcaaagccccagtcacacggtcccacccctgggaagccgcctgggttcccccagccagccttcctctggggtcccctaacccaaaccctcgttcattgcctggcgggcacatggcctcatctgcattttctcctgttgttcccctagcctgagagctgctcaagggtggggcctgtgtcttgtctttgccatggtgatgagagttctgatgctgctggagtgttctgggctgtctttgggccaccacaagcagcacttacctgccctacttggttcatccccaggccacccggtacggagtaactgtctccattccgactcttcaggtgaggaaaccgaggatcagaggagttagaacattttaacaaagccagggcctggcccatttgattccagagtcccacattcttcacaccccaggaactgaaattcaaacactcactgagaccaggcaaggccctgagtgatgcagagaggccaggttggggctgtgactggcaggggaggcggggccctcagctgcagcctggaacagagaccagagtggccaggccttgcgctttttgtggctttgtgtgtgtgtgtgtgtgtgttttcttttttcttttttatagttacactctgttgcccaggctggagtgcggtggcctgatcttagctcgctgcaacctcttcctcccacgctcaagcagttctcctgcctcagcctcctaagtagctgagactacaggtgcccgccaccatgactggctaatttttgtatttttagtagagatgaggttttgccatgttagccaggccggtcttgaactcctgaccccaagtgatccgcccatcttggtttcccaaagtgctgggattacaggtgtgaaccactgcacccggccgaggccttgcacattttaaaagagcggatgcagattttctgtgaaatcaactgattttgaaaacaggtctgagaggcttaaataaatctcctcagggcccttggttcaggggcctgcatctgggccttggcaatgatctgcagtgaccgggcagcacccagaggacccaggacatgaactcgtgggtgggtacccacctctccctgcccagcctggcatttgagtctcctcagcgggggacatcatcaaggatgtgaggggtgccagggcccacggctggtctgggttcactttgcaaaaggggttctgggtgagtgccaagggaggcagttggtgggatccctctacaccccccacattctttccacctggcactcctactttttgagccaaacacatgatgttttcttagtcttatatgaagtgtcaatgaatgcagctaacaacatcccctttcatttttttttttttttttttttttgagtcgtagtcttgctctgtcaccctggctggagtgtagtggtgtgatctcagctcactgcaacctccgcctcccgggttcaaccaattctcctgcctcagcttcccaagtagctgggactacaggcacataccaccatgcccagctaatttttgtatttttagtagagacagggtttcgccatgttagccaggctggtctcgaactcttgacctcaagttatctgcctgcctcagcctcccaaaaggattacaggtgtaagccacctcacccagccaacacccccctttctaatcggaatgtcaccttcagggtcactcatcatagagaaactctgtccctcgcagctcctcgtatcataatgcaaaccccattcgcccttaagattgcggatccagttcctgtagcatttggagggggataaccaagagcaaggatgcagaccaggcctcacaacctcagcactgtggacatttggggccaggtccttctttgctgtggggaccattttgtgtactggggggtgttttgtgtactgggggtgttttgtgtactggggggtgttttgtgtactggggggtgttttgtgtactgggggtgttttgtgtactggagggtgttttgtgtactggggatgttttgtgtactgggaggtgttttgtgtactggggggtgttttgtgcactgtagatgttttgtatactcggggatgttttgtgcactggtgggtgttttgccgcatctctagcctcactcgctagatgtaccctccccgcagtgtaacaaccaaaaaggagtccataaattgccagctgtccccgggggcaaaattgccccgagttaaggaccactggcccagaagaatgacagctgtcaagactgggtgatggtacgtggggactcatcatagtcccctcattgcttttatatgtttcctataaatatgaaaaagtttccttataaatatggaaaagaatacaaagttaaaaaatatatgaaagcaggaattctggagccaaacagtcccgggttttgtatcttggtggtgctgctggccggctccatggccttgggagagtctcaacctccccctctgtgaaatgggtggcagttctccagcctcatggcctcaggtcgaggatttgaacgtgcatgatttgctttccatttggcagcttctatgtagcagtattctgatgtgggcgctgttctagcagctgaggcgcataagttgtggagagtggcgtgctttgttgagtattcacgtgaggcaggcacccggacgctctgcgctgacctcattactcacctgctcagctgctgtgtagtgaggcaagttgctatcattggccccattttataaagagcaactgaggcagcaggaggtggagcttctccccacagtcagcgggaggaggtagaagaggtgtccccaggctgcctggctccagagcctgcagtcctgagctccaggctgcctgaagggattcacttatgcacttggcacagcgctagcacatagtaggtgctcagttagggtgggctgcgaggattgcttttgtagacagctctctctggaggggctgattgttccaaaccccccccaccatgcggcaccgtaggtgtgtctctgacgtcttcaaggctgccaaagccaagtcctgaagctgctttttacagaataacctgtcgcctgcttcctgccatgcgctgatgtcggccaccatggatctcgcctgcaggaattgaatggagtggctcactcgcctctgagctgctgcccatctgggtcagcccctccacactgctcatgccaggagcacgccggtgctcaggggtggccgggttcgtggtgtgtctcaagccatgctgggtcatgaggggttgggctagccacgcccacctgggcacacccgccaggggtgtcttgggtcccacctctcccacttcctcccatcttcagccctccattccatcttgaccactgggggaggggcccaggcaaggccccaccctcacccccagccctgcttggtggagatttcggcctctggctctgcatccccaacaattctgtttcctgctgtctctcttcccatctccatctctgttggtattctggtctgtctctatctttgtgtcactgcctggatccatgtctcttgcgttcatcttgcttgtctctgcgtctctccatgtgtctctgcatccctatctgtgccactccatctcctcgtctctcctgcctgtgtctctgtcccatgtctctctgtgtgtcacctacacaatcacaaaccttcactgtgccccctgtcccccaggccacaatcctcgcatcccccttcgtgccccacctccacctgcatctctggctcctccaagagaccttcctgggaccccttcctcctcagactggaaggggaaggggaagggtgtgggccggcagggctaggacaggtctgagtctgtctgccgtccaccagcctggccggcccaggctgggccgtgggcacccattgcccttctctgagccctgatgtccacatcagggcataagtgcgcccacaggagggccccccagggacgcttttgactgtgtcactagagagcaacacttggtacgtgggaactgttagtaacaacagccatgaacctgaggatgaataaatggaggacctgggtccccgcctgggcttagggtctctctggagaataaaactcacaggcagaaactatcagcggataataacaaggtgggctgcatgcatctcacttccatgcctcacagagaaaaagaggaacgagctcaagggaagctgcagaggacaggctgggaaaggcctgcgggagggaagagcctggcccatgtgtggcattcgcagcacagcccacgacaggctgctgggtcgcaggcattcctgagtgaggttgggcccggcaggggatggcaggtgtgatcggtgtcagaacgcaggttctggaatcaagcagtgtgcagaggtgagtcgtttgtcagtgcagactcctgcctgctgcctgcagctgtggattgggtctggaaaaggtgcaatccctttgatgcccacggagcctgggaagtacttggctctgttcctggtcaactttctgctgggaaaataaaccgtgtctcattaggcagtgagttcatcccgatgcctgttctggctgataacatcacaccttgtcatgctgccaggcccaaagtcaaggtcaaagttcctgttacttagggaatcctaataattaacctgggaacctcagccggagagggagatgctggtttttaaatggagtgagaagctggagcagggaggtggctgtttcggggctgggcatctccaagcaccaatttcaaggtgccaccctgatcaggattggtgatcacagtcttccagcctccttgtcccttttgtgtctggtagctctttgctggcctagacctggctccagaggccttgggcagtgcccctggaagtgtgtgcattggtacggggcaggaggggctcagatgacagtggtcagtgcttggagagacatgggggcgctgcttgcagggctgcctgccagcatctttgtgcctgacatgtggcctcctataagctctcactctctggccagcagtcatttattgagcacctactgtgtgccaggccctctgattgattgattgatgagtcacatcacttagtggctgagagatgttctggcacttgtaattttcaagcctccttgtaagttaaacattgaagcagtatcagaactggctcccgtaactgtgatttagtttaaatgttcatattttgaaactgaatgcatttaattacttaaaatgcaacattataacattgtacgtttgtgctgttcacaagctaatgatggcattttagaagcatatgaattcagggagccctgttcagaatgaaatgagccttcactcattgagcagtattttcttccttttttttgagacagagtttcgctcttgttgcccaggccggagtgcaatggcgcgatctcagctcaccgcaacctgggcctcccgggttcaagcaattttcctgccccagcctcccgagtagctgggattacaggcatgcgccaccacacctggctaattttgtatttttagtggagacggggtttctccgtgctggtcagactggtcttgaactccggacctcaggtgatccgcctgcctcagcctcccaaagtgctgggattacaggcttgagccacctcacccagctgaacgctattttctaagcactttccgttatatgagcataatgccctatgaggtaggagcaattattagcccccatttttagatgagaaaacagaggcacagagaggttagtaacttggccaaggtcacacagctaggaagggggaccgctgccatctgagggatttggaaatgggacagtttactgcgctggatgaagggactctgctctcaatgctagcagctctggggctttggtgggggatgtcaaagtgcaaattcgaggtcctctgtgacccccacctccacttccacccttattcccataagcaacatgagtctcactgagggaatgggcaggtagtgggaagcctctaaggctttgtgccctgagaagtgagttattccccatcagcagtcccccatttctggttctgttgagaatgtccatggtggggtgagggtgggcggctcagccagcaggatgttctcctctttccctctgtctctagggttcttgagcctggagaccaccccacagtgttgctgcctggagcttccttccatccacctccatgcccatcccgtccccacacagtcccctcttagcctgcttgtctgctccgggagctgccaagaactagcaactccagcccctgggccaggcttaactctgctgccaaacctccaccccatcttcattcattcattcattcaagttagtacagtaatccctggtatccatggggcttggctccaggaacccctttcagttatcaaaaatccatgggtgcttgagtctctaatacagagaatatatagagagaatttgcatataacttacatacatccttccatatactctaaatcatctctagattacttataatacctaatacaaagtaaatgctggacgggcatggtggctcacacctgtaatcccagcactttgggaggccgaggtgggtggatcatctgaggtcaagagtttgagaccagcctggccaacatggtgaaaccctgtctgtactaaaaatagaaaaattagccgggcatggtggcaagcgcctgtaatctcagctacttgggagggtgaggcaggagaatcacttgaaaccaagagccagaggttgcagtgagccaagatcgcgccattgtgctccagcctgggtgactgagtgagactctgtctcaaaaacaaaaaaacaaagtaaatgctatatagatagctgttacactgtattgtttggggaataatgaccaaaaatcagaacatgttcagtacagatacaaccatccttttttttttttcttgaatttttttttttttttttttggtgagacagtcactctttcgcccaggctggaatgcagtgacacagatcatagctcactgcagcctcaaacttctgggctcgagcaatcctaccacctcagcctcctgagtagctgggactacagggatgtgccaccacgcctggctaacttttgtattttttgtagagacaggctcttgctattattattattattattattgtgtgacacagaatcttgccctgtcacccaggctggagtgcagtggtgagatctcagctcactgcagccttgacctcctgggctcaagcaatcctcccacctcagccccccgcaagtagctgagagactacaggtgtgccaccatgcccggctaatttattattattattattaatgtagagacaatgtcttgctatgttgcccaggctggtctgaactcctgggctccagtgatccttccgccttgacctcccaaagggctgagattacaggcttgagcgaccacgcctagcctcggttttgaatatttttgattcatgttggttgaacgcatggatgtggaacccacggatgtggagggccgactgcacttatctttgaaccacctgtgtgagctaggcactgttcagacccttggcgtggaaggagtagaggccgcctgctcctggccctggcgatggcctagtgtgtgatatgccccagggagagccctgtaaggaagggaaaggagaggtgtctgaggaggaggagacaggggccagggagagcctctggggaggtgacttgagagccaggtggctggtgctctgggggagggaagaagtggagggagtaggctctggggccagtgggaggctcagcctggaggctctgagacctgctcagcccttgttttactgggaccgctctgctgcatgtagagggaagatgccaggtgtgcggtgtggagcttagggagcttagagccgctggaatggtccaggagacgtgctggtggcctggcgcaggttgaggggggcaggaggaggtggggaggtgtagccaactctggatgtgtgtgcgtgttaattgaaattttcttttgagaacattgtagattcacattcggttacaagaaataacatggagaggccggacgcggtggctcacgcctgtaatcccaacactttgggaggctgaggcgggaggatcgcttgaacccaggatttcgagaccagcctgggcaacatagggagacccccatctcaaaagaaaagaattagttgggcatagtagcatatgtctggggttccaggcatttgggaagctgaggtaggacgattgcttgggcctgggaggttgaggctgcagtgagctgtgattgcaccactgcactatagcctgggcgacagagtgagatcctgcctggaaaaagaacacagagagatccctttctgtgcccagttgtccccagtggtaacatgcttcaaaaccatagcacaatatcccaaccaggatagcaacatgaatctgacctgctgatcccatgcagagctccccagtccgacttggactcatttgcatatggcataagtcctgtaggtttgtacccattccatacaatttacttctatcagccaagacactgagcagggtcccgccaggtcccctgtgctgtcctttataaccaccctaacccttcctgtcctccaactccctgcccaacccctggctaccactcatctgccctccatttttaagattttgccatttcaaaaatgttctataaatggaacggtgcagtctgtgaccctttgggattggctgttttcactcacatacttccctggagatttgtccaagttgctacatgaattaagagtctgggccgggcgtggtggctcacgcctataatcccagcactttgggaggcccaggagggtgggtcacctgaggtcaggagttcaagaccagcctggccaacatggcgaaaccccgtctctactaaaaatacaaaaattagccaggtgtgaaggcacacacctgcaatcccagctactcaggaggctgaggcaagagaattgcttgaacctgtggcggaggttgcagtgagccaagatcatgccactgtccttgagcctggcgacatagcgagactccatctcaaaaaaataaataaaagaaaaagacaaagagtgtgtcacttgagcccaggaggttgaggctgcagtgagccgtgatcgtgccactgcacttcagcctgggtgacagagcaagacccggtctctggaaaaaaaaaaaaaaaagtctggatacgtttgcaggcagagccaacaggatttgctggggtggtcaagcagcagttagagatttgagcgtggagttcagcactggaggcatccagtattgtgtctccatgaggccaaatgaagtcacctgggagcgggaggcccagaggtgggaggtctgagttcacatggattaggcgtctcctgtgcggcagatgctgtcctgggccaagagttcagcagcgaatggggcagacgagttccctgcgtggtgaggggctgaccagctgcagcatcggtgtgggcatggactaggaagcaggctcgggatctcattcccttatcgtttctctctttgcagctgtggagggctccagggcctgcaccgtgtggagcccacagtgtgggcctggggtggaggggctggaccagagctttgcaggagctgtgagtgaaatgacaagggtgcggtgtttccctgaaggcgagatggcctccgtccagcacggacggcctgtcttctgagatgtcctttatacatttagaatatcatagctttcacagagggatggggttggcaggtgaggggggtgcagttgttttgtgtgtccatgccaggggcaggtgacctgccttgcttgggcgcagagagtcctggaacccttggagcgactaccccagctccctttcccatctccccccgctccagcccctttccccagcctggccgctcatccctgcttccctccccctatgtggctgcttcatgtttgcatcagggccactaggctgttccttcatattttcttttctttttctttctttctttcttttctttcttcttcttctccttttttttttttttttttttttttagatacgggttcttgctctgttgcccagactggagtggagtgacataatcatggctcactgcagcctccacctcctagactcaaacgatcctcctgcctcagcctcccacatagctgggcccacaggcacatgccaccatgcttggctaatttattttattttttatttttactagacacaggagtcttgctgtgttgcccggctggattcttgaattcctgagcttaagctatcctcccgccttggcctctctctctctttttgcctcattctttcctccttatccctctagttttccttctctcttccccacttcccctcattttcccctcctttccatctgtttccgctctctggattctgccctcttgtttttggcacttgctctcttttacgtttttctcaagccgccttttgtttccctttgtgtctcctcctgtctcatgatgttcatctctgtttccactgtgctgtctccgtctctccctcttttcctttctctccctcttaaaaattattccccagaccttgaaaaccatccatcccttttcactctcaggggcctggatggaagaaaatgtcttcatcaggcaaggacagtgcaggagaggggtcgcaggtgcatgtgcaggcccggcagtgctgccggggagaaggacgggcctgggctgagatgcacgggcacagccagacctccaaggacacctcatgtctgaggaaagggggagtttgagaagaggctgccagggctccctggaggcctggaatgggggagaaggggcacaggggacagtccaggccttgtctctgaagcaggtccttcagctgcacttgggctgtgcttctctgtagggagggggcatagctctagggaaggaatttctccaggcctggcaggggcctggaggaggcatctgagcacctgctggttccaggctgcctctcgttttgcactcagggctttttttgtttgtttgtttgtttttgaggcagagtctcactctgtcacccaggctagaatgcagtggcacaatctcagctcactgcaacttctacctcccgggttcttgtgcctcagcctcctgagtagctagaattataggcgcatgccaccattccaggctaatttttgtatttttagtagagatggagttttaccatgttggccaggctggtctcgaactcctgagctcaagtgatctgcccgccttgcctcccaaagtgctgggattacaggcatgagccaccatgcctggcgagggcttgttttttgaatggataacagctgcctgcatcaggaactgggctccttagagtagtatttgtgcaacctgacaacatggtaggtcaggttttcttcccagagctaactggtgctttttttttttttttttttttttttttgagacggagtctcactctgtcacccaggctggagtacagtggtgcagtcttggctcactacaacctctgcctccagggttcaagcaattctcctgcctcagcctccccagtagctgggattacaggtgcgtgccactatgcctggctattttttgtatttttaatagagatggggtttcgccatgttggccaggctggtcttgaactcctgacctcaagcgatacgcctgtctcggcctcctaaagtgctggaattatattcatgagacatcacacccggcctagttggtgctattttcaatacttttttgtggagccaaccaccttccaggccggccaacaaaaccttcaaggattctattgataattcagcatcaaagtgagaaatgtatgactctgatgtgacagcagttggtggccggactgtagccagctgttggtatgggataaggggacggatctggaggttggacactgactgcaggcgtctgggcctaaagctgcctcccttggggaggtggatctcagtgtgatgggggacccctgaacccagcgaggccactgggcacagctgttggtttgttgccctgggctacgaaggactcttccatttgctgctctgtcctgcaagtgggtcaatcccagctccagccaaatccatctgctcatgtgcccccccaaattctaccaccgttgccacccctggcctttgccccatggtgttttctcagccaggagcgccagcaccatgctgtcccttgttccgtgcccagggctcatctgtggcgccttcctcgagtcatccttttgactgatagcacaggatgaagaacaccatcctgagggcacacagatctcaggtgacagtttgaaatgccaaggcagggcccctttgtcaaacttactaagaacttcaagacagggatagcagagcggtagcccacgcccggggcctgattgcatgggtttgcacactccagaggccggcctggtctgttgtacaagcatcacgccggggagtgagttcctaaaccccactgagtcttagtttccatggctataaaatgggatcaccattcatatccctgcagaggattgttgtgtgtgatcatcaagatagagtaagggggagctgctattgtccttactattgatcatgattgatttttttttttttttttttgacagagtctctctttgtcacccaggctggagtgcagtggtgtgatctcagctcactctaacctccacctcccaggtccaagagattctcctgcctcagcctcctgggtagctgggactacaggtgcacgccaccatacctggctaaattttttttgtatttttagtagagacagggtttcgccatgttggccaggctgatctctaactcctgacctcaggtgatctgcccgcctcggcctctcaaagtagcattattgataccatttaacagcaattgttgtctgtgttattcccccggcactttgcatctgccgccttctgtgtgctttatttatatttaaatgactttttggctgggcgcagtggctcatgcctgtaattccagcactttgggaggccgaggcaagcagattacttgaggtcaggagtttgagaccagcctagccaacatggtgaaaccccgtctctactaaaaatataaaactagccaggcatggtggcgcatgcctgtaatcccagctactctggaggctgaggcagcagaattacttgaaccctggaggcggaggttgcagtgagccgagatcgcaccactgcactccagcctgggcgacagagcaagactctatctcaaaataaataaataaataaaaataaagatatacttgtgtgtctatggtgatgagacacttacagtcagtggccatgtgacaggagcaaagcccaggcgccttggtgctcaagtaggatgactccggcacaaaccatcaattgaaggagggagtcaggactctaggacagagggatggggaggggcaggaggaaagaggggacttggcccatggacagcagagtttgttggccaagtttggagggaccagactcgatcaggagctggtgccccatggagccctggttttggagggtgccgtgacaccgactccccccacctgctgtccctgtgtgtgagcttggatttagtagccagcagcttggcaagacttctggggccactcctctgctggtttccatgttaacgcttttcctccagctaaaagcagaatctgtgggaatccaggaaccttccagagctgccccctagggtcagcatcaccttaacaagattgcaccagcttgtccctgctgctggctcgccctggacaccggctgccagctccagcagccccaagccctgtgcttctgtcactagggcctcggcagcctcccatgtccaccagctgctgtggtcactgggccggcagaggctggggtcagggctgggctggactgggcaggaggattcagatgggaaggggccggtgcccacacaagctctgcaaggctgtccagcccaaccccaagggcaggactggacacgcaggggctgcccacagagaaatgggaggggttctgctcacagctgtcagagtgttctggaagactcagggccctggagcagacacaaacattgcaggcaggacaggctgaggtacagaaagcccggagccaggacatagcagggcacccaggacctaggggacaggacctgggggccggcggtagtgggggctgccaccaagagctcagaagagcccagttgagtctctcctcagcctttgaccagctgggaccctgggcacgtggcctagccctgttctctccaagcccgctttctcatctgtacagtgggcatcatcacaggtcctcactcacggctcttgtaagcactggaggagacagcaggggagggacagcagccaccggccgtggtgggggccccaggtcagtagtcccttacttgtagggctcagggtaagcagaggcctctccactggcatcctcttcagccttacggagccttggcctggtggtgtgagcctggagccactgccagcttggatgcccatagggcttcacaggtcctgcaggccaggcggggacagtgacaaaccagacagcgcatgtcgtggctgatggggcagctcactgcaccctgcaggaatgtgggcctgcggtggccagatagctcagtttttctagagaaataggcactcaatgtttatttgaacatcccagttcttcactgttggcaatgaactcatttttaaatttgtctgcaagccggatgctgaccaaaggtgacccgtttgtgctctctgagtgggccagatcaggcaacccctgagggtcctgaggttggagggcagatgctgaagggacatcctggttcctgactgagagctcacccccagccccacacagctccgggggtgcctgtgtgctgggacagtgcagatgctggagctgggcaggcctggggtcaaaccctagctctgccaattcccagctgagtggttatggccaagtgactcgctgagcctcagtttccccttttgcaaagtgagatggaggttccctgcctctctcagccgctgtgaggatgaatgctctgtgacctttcaggtcccatcgcgggccgggcactctgtaaatgctccgttctcggtcactgaggttgaattaagagaggctggggcttggtttatggagtgagactgatctgtttcttctgttgactttaaaaaaaaaattatagaattagagcgaagttgctatgatagtacagagactctctttgtactccttggccagcttcttctgttgttaacattttactgtgtgcattgtcacagctaaggaaccaacactgacacattatgaactcaagtccacagttgcttctgtttccctaaagtctttttctgttccgggatcccatactacattcagtcatcatgtctccccagcctcctctggcctatgacagtttctcagacctgcctgttttgttttggtttggtttggtgtttttggtcttgggcttttgttgttgttgttgtgtttgagagagggtctcgttctgttgcccaggctggagtgcagtggcaagatcatggctcactgcagccttgacctccagagctcaagcaatcctcccacctcagcctctcaagtacctaggactacaggtgcatgccaccatgcccagctaatttttttgggttttgggttttgtctgtagagatggggtctccctgtgttgcccaggctggtcttgaaaccctgcactcaagggatcctcctgccttggcctcccaaggtgctgggattggccaggcatggtggctcactcctgtaaccccagcactttgggaggccaaggtgggcagatcacttgaggtcaggagttcgagatcagcctagtcaacatggtgaaaccctgtctctactaaaaatacaaaaattagccaggtgtggtggcgcacgcgtgtaatcccagctactggggaaactgaggcatgagaatcatttgaacccgggaggcagaggttgcagcaagccaagatcatgccactgcaccccagcctggatgacagagagagactccatctcaaaaacaaacaaacaaaaacacccacacaaagtgatgggattacaggcatgagccaccacgcccagcctcagactttccttgtttttgatgaccttgacagttttgagaatatcgggtaggtattttgaacaataccctttaattagggcctatctgatgtttttctcatgcttagaccagggctgtgggtttgggggaggaagaccgcagaggtaaggcgcccttcacatcatagcaaggatactcaacatggctcagcactgatgctgctggacgtgggtcacctggccgaagtgacgtttgccaggtttctccactgtgcagtttctttccccactttccataccctgctctttgaaagcaggtcactaagtgcagccctactcaagagaggaggggcagatgcagacaaacaatttggaattgttttggaacgattttgagatttgtatcttctccttgtctgcttgcttttgcatctagcagttgtcaattcttgggtgatcctttctttctttctttttttgagtcagagtcttgctctattgcccagcctatagtgcagtggcacaatcacggctcactgcagcctcgacctccagggctcaagcgatcctctcacctcggcctcctgagtagctgggactacaggtgtgtgccaccatgaccagctaatgtttttgtttttatagagatgggggtctcgttctattgcctaggctggccttgaactcttggactcaagcagtcctcccaccttggcctcccaaaggctaggattacaggctgccatgctcagcctgatcctttcatttcattatctaaataacccgggcttgagtcctagctcagcacatttactctctgtgtgacctgggtgactcactattaacagagggatcatgagaacaagaggatgtatacaacaggctgcacctggtgctttgagcaaataggttggtgttttttcctacttgtgacaagaagtactaaggtggcccgttgagctgacagggcgtctcaaggaagtagtcagggacccaggcttctcctggctgctattctgccatccgtagcatgtggattttgtcttcctggtcccaaggtagctgcagcacctctagcctcactgccatgctccaggcaggactcagcgaagctgatggcgttatccccgttttgtagaggaagaaagtgaggcagaggaggatgagaaaccctgccttaaagagtgctgtgaggttagaagtagtgtcacctggtgtgtagtaggcatggttgttttcacagtaggatgggcctctctcaagctccctggcactgggggtgcccagtgccctgggggatgaaggtgggcctctagcagcaggcacctgagctcctccacttggccggcctgaggcttcaggctcagaggggctggcccaggctctggtggggctgtgggtggctggggcagaccctggacaaccttggatcccagcctgtgagtacaggtacagtgtgtccacccccccttttggggtggaggatgctgggcccagcagccctgttgacctgtgcctcttgcctgttctgggcaagccaggactggctggggctgcagtggtcacccaagaacagccaaccacataaaagtcaggcccaaggacagtcactgaggtgggcctggccttgcaactgggtagccatgtctgatgacctactattcagtgctcacttggaagggagatatagggaagggtttgttgttcctgttctatttgggagaacagattgaattcagaggcaaactatggtctagggatcaaatctggcctggcactgcttttttttttttttttttttttttgagatggagcctcgctctgttgcccaggctggagtgcagtggcgtgatctcagctcgctgcaacttctgcctcctaggttcaagcaattctcctgcctcagcctcccaagtagctgggattacaggcacccgccaccacacccagctaatttttgtatttttagtagagatggaatttcaccatgttggccaggctggtctcgaactcctgacctcaggtgatctgcctgcctcagcttcccgaagtgctgggattacaggcatgagccatcacacccagcctgccattgcttttctaataaagttttattggcacacagccatgccttctgtttacatatctatggctggatttatactacctgggcagagttgagtggttgtgacagagactgtgtggtttgcaaagcctaaaatatttactatctagctctttacagaaaacattttgctgaccctgacccaaaaaccaggcagggtcagggatgtgcgattagggcttcccgagagggagatgcgggtgggcccagactggcgaggggctgcggcgggtttgtagaaacagggcagcacagggcaaacggaggccctgaggtggtgggcttggctttagagcagagcttgttctgactggggggcttcagaggagaggctgtgaacccagccggggcctgaggcttcaccctgtcacgtgctgtgacagccatttggggtctttgtgagaaacggagctgctgggtgttgcggattgccggggccaactctgaggcttcggccagacgcagcaggttacaggaaccgtggggatctcaggctggggctcctcagctcagccaccctcagccatgagggactgtgggcccggagttgcccaatggtctgattttccaagagaaaccggcagtctgcttttcacgggaaatctgatttttacatgtttgcagttaattccatttttacaaaatcacaaagccgacccagcacacatgcatttggcctgtgccctgcaggtctgggaactcaggtgcgcagggtggacgcagggagctgcgggggtgtggggagactctgaaagcagccaggccctgcgccccagcactccctgtggcagaggcgggccttgggctgggggtgggctgcggaggagctcacagccgtgtcaggtttctgtgtcttgacctatcctatcccagagcagagaacattcctgcctgcggcccgggaggagggggtggggagctggattccaaagggttggacgcacctcctggaccccagcggggactcattcccagccggagggcgagaggtgggacgtggagagctctgaagtcttctctgagattttcaaaggtgaaaaccccagggtttgagtttgctgctccatcctcaaggagccctagagggcgatgggcaagggctggtcttggagctggacaggccgaggggaccccagctccagtgctccctccctcccgggacccctgagacatagcgactcctcccttgcaggctgccatgatagtccaagagagaacgggtgtgaaagtggtttccatggcatgcgggtgtgccggtgagggggtctgcctctgggaaatggtcctgtccacccgccagggcgtctgcagccggacagccctgcgggcatctggttgttttcagcctcacacaccagcccttacctgctgattcaggcggctggtttcaaagcacttgctgccacccctgggggtttattatctatttcaggcaggactcttagttacaagcaaccctggtcagtgtggcttaaagaaagaagagaattttgaggctcatgaacaggaaaagccccagggtaactccagccttcagcaaaatagggttcacgcgctccaagtgatattggcaggactctgtcttgccgcgtcttctaactctgcatccttctgtgcggggttcattctcaggcgggcccctggtggggtggcaggagtggcctgtcacctgaactcccaggaacctctggggagagcatccctgtcccagtagcaagaatcgcagtggccctgtcacatgcttactcctggactgatctctgtgggtggagggtgagctgctcacatgggctaggcctgctcttggccccagcctgagctgtgggggaggtggggagctgctcggatggggagttgggcacaaggggatcccttagaaaaatcaagatgcagccgggcatggtggctcacgcctgtaatcccaacactttgggaggccgaggcagacagatcacttgaggtcaggagttcaagaccagcctggccaacacggtgaaaccctatctctacaaaaatacaaaaaaattagctggttgtggtggtgggcgcctttagtaatcccagctactcaggaggctgaggcaggagactcgcttgaacccggaaggcagaggcttcggtgagccaagattgcaccattgcattccagcctgggcaacagagcgagactctgtctcaaaaaaaaaaaaaaaaaaaaagaggggccgggcatggtggctcacgcctgtaattccagcactttgggaggctgaggtgggtggatcacgaggtcaggagattgagaccatcctggctaacacagtgaaaccccatctctactaaaaatacaaaaaaattagctggacgtggtggcgggtgcctgtagtctcagctactctggaggctgaggcaggagaatggcgtgaacccaggaggcagagcttgcagttagccaagatcacgccactgcactccagcctgggcgacagagcgagactccatctcaaaaaaggaacaaaaaaaaaaaaagaaaaaaatcaagatgctagcaccccaaggggaaatggacagacaggcggaaacagcgcccacccatgcccaccactctccaagactgtgttttggtctgaagaggaaacacctgagcttcctggctcatgcccctctgcccctgcctggctgacttcagcccagttctccaaagagctgtgggttactcacccacgtgtctccagcgtgtcctccaaggtgtcaggcttgggcctgagtggatgtggagcggcaccagcctctgcagccttctgtctggtcttccaggccagtggccctcctgaaaaaggaaagcatgcttgttctccttggagcccctgggggctcctagtgattgacttcctttctgagtgcacgggaagcagctgttcaataatccattgtgacgtttggccagacaccgacagagcttgtctccctgcgacccccttgtccaaatgcagggatgacctttcccctctgtgaccaggaaggatgcaattgttgggggtttcttacattagttctctccaggcctaaagacgccatcacatctagagctgccggcggcctctcgccactccctctccttggcttcttcataatgatattgatttttcctccatttttagaatccatctccttgagggaggagacagaaactccatccctctgcacagaaccatttcaaaaaggaacagggggttgggatgaggcccagctggcctaggagaggccgcctggctgggccgaacactggctctggcctggcctggtcactgacccttgcctgggtcctcaggaccaggagaagaagggccgtgtcttttcagatcacagaacactctttggcccctagtcatgtgtcaggatgagaggggcggtctttgaactcccatgattcacttgaatgttgcattttctagatatcatgacagccagatctcaggccatcattaaaaagaaagaaggtgaaattccacacctgtgggttacccaccagcggcagccctctggctggagatgtatcttgtggctcagctcctgtttgtgttctgattgcagtgccatcagggggacgtgtgtccactgacccacagaggcaggggcagctggggaacgtgctaggagaggaggggcaggcaggaatagaccttgtctcccgagtcatcccctgagcaggctgagccaagagtggctgactgaggattggctgggcacaacgttccattcgccgtgtttgaggttcacccttggccaggtgcgtcacttgtcctggttttccagatgtgaaggtggtgacgcaggctggtatgagatccctagatgtcagagcatgttttagcttatttaagatcctttgatggttcccttctgcaacaggctcggtgtgatgtggtggtaagtcaaggccctggagcccagacgtgattacctggccactctcacttttgggggacacatgaaacagcctcctgctgtctccactgtcgcccctagagtgtattctctctcctgctcttcctgaagtgcagacctcatcacacacacagcctcctgcttacgagctgcaaaggccctcagtgctcatgggatcaaggtcatagcttggcttgcaagatcccaggtggaccccagccctttgtctggcttcctccctgtctacgcgctgatccccgcagcccccacactccacccactcagcacaggctgttccctcggcctggaacaccggcccttggtacctctatacccctgttctcctgactcctggccagttgctgctgaggctgtgaaggtcctacacggctcagcacccggaaactcccccaaccctctaggatgagctgaggccccatctgggttccccaggcctttgtgcctgtcctgccatcagcccgcatcatagggtggcattgtttctcctggttcatttgtgtccccactaagtgccatgccccatgagggctgggatggttgtcttgttcacagctgtgtcctcagtgcacaggacagggctggcctggtgcactgtgagttgccggctggtggacagatgcttggaggatgtgtgacttggggcagggcaactcctgagtcttgatctccccctctgcactggggtcatggtgtcaagtgcagggggaggggagggaaggggagcaggcagcatggggaggggcctgcagaggtgtctggcagtggggaagctgtcattggccatagtctggagcccacatccctgtactgacacgcagctttcagctgtagccagaactgggtctcagccagagtgggcagaggtggccaggagacgagacagtgcagggagctgggggacagggttagggggtggtgagaaggtcccctccctctgtcctccttgaccatgcatccttgctcatctccaccggctccaaccaggagcagtagcccgggagccctctccttcttctggtgcaggccgtggtccttacaacctggactctgcatgagaatcacctgggagctgtgaaatgtcccacacccaggccacgcccccgagtagagacatctgaccccctggcgtgggccccgggcatcagtagttcataaaactcccaggagattccagcgcatggccaggtttgacagccgtcattccaggtggttcttggtgacctggtttttcctggagatgctcagcagcctgcaggagcccgccagccagcgcacagtgagcggctcgatgggaaatctccccttctccgcctccctccacaaaaatcctcaccagaaacgaggaagcacttcttaaaatggttttgttttttgaaagagtagcacatgcctatggcaggaactccaggcagcacagatgggtacacagtggaagaaaaatcagtcctggccgggcgcggtggctcacgcctgtcatcctagcactttgggaggccgaggcgggcgagtcaccggaggccaggaatttgagactagcctgaccaacatggcaaaacctcatctctactaaaaaaaaaaaaaaaaaaaagaaaaaaaattagccgggcgtggtggtgcacgcctataatcccggttaactcaggagactgaggcaggagaattgcttgaacccaggaggtgaatgttgcagtgagccaagatggcaccactgtactccaggctgggtgacagagcgagactccgtctcaaaagaaaaaaaaaaatcagtcatgccaccaaccacagccactgtacccaggctctgagatggccctgcagagctgtcacgtgtcggtataggtccctttgtcacatgtctacccttctcaccttgctttcttagtcctcctctgccagaacatattgatctgcctggctttttcttttttcttccccgagacattgtctcactctgttttctaggtggagtgcagtggcacaatcccagctcgctgcaacctccgcctcccgggttcaagtgattctcctgcctccgcctcccaagtagctgggattacaggtgcgcgctaccatgcccggctaatttctgtatttttagtagagacaggctttgactgtgttggccaggctggcctcaaactcttgacctcaagtgatccgcctgccttggcctcccaaagtgctgggattacagtcatgagccactgcgcctgggctgcctggctcttcttgatgcctacagagtattccattgtggagagggcctgacatggatgccttggtccctttgggtggccggctttggctgtcacaggcagtgctgtcagaggagctcagagtctttggtcatatgtgtgagtcctgcaggatgaacttgtagaccgggaattcctgggtcatggaacaagtggatccaaatcgctgatagagcttcatttcttgtcattccagaagtcacctgcaccggtgcccgtgacgtacgagctgcccacactgtataggacggaggactattttcctgtggacgccggggaagcacagcaccacccccgcacctgccctcggcctttgtgagctttgtggtcttcccatcaggaacgctggaaagtgacattgtgtacacactgcagcttgggggttttttctttgtattgctgtttattttatattttaaaaatatttaaaaaaatgtcgagatggggtctcactatgttgtccagactgatctcaaactcctgggctcaagtgatccacccaccttggccttccaaagtggtgggattatgggcaggagcctccgtgcccaggctgctgccattttcaaatttcctccctgcctcatgtgagaccacagggtttggagaagcagttggaacccacgtgtggtgatgcctcccacatcggcctgcttggggttctacaggggttgagggaccaggcctggccggggctgatggacagtggggactttccttctctccatgatggctttgcaggggctccatggtccttctctctgtgatgggtttttgcacggggtgtgctctgccactgtggtgggtgggtggatgctgcttctgttgcctccagacctcggtgcccacagccttgaggatccttccaataaaggtgtcaagagctcagccctggtctggtgtgagaatgacggggagtgatagtttccttttcacctgtgcagtgttttctagaaggttcctcctgtgcctcacctgcgagggcctgatcctgggcacctgctgatgaggctccagctgagggaggggtagtcccggcctttggatttccagcaagagtgcagaggtcattaggacccccagggtcttcaaaggcttgtttacccacatttcttcccatgcagatgagtttcctgctattgtcctaacactccggatttctcactgtggcttcaacctgcaatgggtatttctggaattcctcgaagagccaagaacacacacataattcccctatgcacatacaggactgaactgtaaatctgcattagaatttcaagataatctgcctgggcaaggtgactcatgcctgtaatcccagcatcttgggaggctgaggcaggagggtcgcttatgcacagggtcaagactgcagtgagccgtgattgttctactgcaccctagcatgtgcaacagagcaagaccctgtcccccacaccccaaaaaagtttttcaaggaagcctaaaataatgaatctggcaagatagagtagaggccaggtgcagcggctcatgtctgtgatcccagcactttgggaggccgaggcaggcagatcgcccaggagtttgagaccagcctgggcaacataatgagaccatatctctaccaaaaatacaaaaattagcctggcgtgctggtgcacatctgtggtcccagctacttgggaggctgaggtgggaggattgcttgagcctgggaggttgaggctgcagtgagccatgattgtgccactgcactctagcctgggtaaccaagtgagatcttggctaaaaatgtttttaaaaattaaaaacagaaaagcagggaaatagtttagacaatttttggaattcagagatataggtagaccccttgtttctggaaaagtcagcatttttattctcttttcttttttttcgagatggagtctcactctgtcacccaggctgtagtgcggtggcatgatctcagctcactgcaacctccgcctcccgagttcaagctattttcctgcctcagcctcccaggaagctggaattacgggagcacaccaccacgcccagctaatttttgtatttttagtagagacggggtttcgccatgttggtcaggctggtctcgaactcctgacctcaggtgatcctcctactttggcctcccaaggtgctgggattacaggtgtgagccaccatgcccggtcagcatttttttattgaggtgacttttacaattttttttttctttaaatgagacacctgtcacccagcctggagtgcagtggtgtgatcatggctccctgaaacctcaagctcctgggctcaagtgatcctcctgcctcagcctcccaagtagctgggaccacaaatgtgcaccaccatgcctgg

SEQ ID NO: 101 - protein, 44 aa, Homo sapiens
MSDKPDMAEIEKFDKSKLKKTETQEKNPLPSKETIEQEKQAGES

SEQ ID NO: 102 - DNA, 1052 bp, Homo sapiens
gccatttgtatcactcattctgcctacaaaacaaagaatgcactgtggaatttgagggccaaacaagatggacatgctacaaatgcagttcaagtaacaaagtaggaaaactcagtgaaaattcatctgaaattaaaaagggaaggataaccccatcacaggtaaaaatgtctccatcgtatcatcagtccaaaggggatcccactgctaaaaagggaacctcagaacctgttctggatccacagcaaatccaagcatttgatcagctttgccgtctctaccgaggaagctccaggctggctctcctcacggaactctcccagaatcgcagcagcgagagctataggccattcagtggctcgcagagtgctcctgctttcaacagcatcttccagaatgagaacttccagctgcagctcattcctccacctgtgactgaggattgatgactccatggagcctggcccaggagaaccagagatgatcccgaggcagctggggagaggccccgcctctggtgggcttggcctccaccacctcccacgcttctgagaagaggttccaaattgggcttctgtgcccagagcgtccacagcaccattcccagtgtagactcccagtcttctccacattgctgtcatggcgtcagttcaccagactcattgattttgttttgcttgttaagcaaaggaatgtcacatacctctgtccagctttttaggaaatacatttcgcctattgcgactttttccatttaccctgaagcctagaaagtaggtggaactcacacaaatggcattccagagtctgccatactccgtctcctccagctgctggataatacagaggaacttcaacttctacagggaacagtggttggccaggctgcagtataactgaagcatgccttggagagagcagacactgtgggggccagggccatctccctttaatgtgttcatgttaaaacctatttgagtgtaagacttgccctttctaacaataaatgctccgtgtttaagttctgcaggtctcaaaaaaaaaaaaaaaaa

SEQ ID NO: 103 - protein, 92 aa, Homo sapiens
MSPSYHQSKGDPTAKKGTSEPVLDPQQIQAFDQLCRLYRGSSRLALLTELSQNRSSESYRPFSGSQSAPAFNSIFQNENFQLQLIPPPVTED

SEQ ID NO: 104 - DNA, 4264 bp, Homo sapiens
atttcccgccagcaggagccgcgcggtagatgcggtgcttttaggagctccgtccgacagaacggttgggccttgccggctgtcggtatgtcgcgacagagcaccctgtacagcttcttccccaagtctccggcgctgagtgatgccaacaaggcctcggccagggcctcacgcgaaggcggccgtgccgccgctgcccccggggcctctccttccccaggcggggatgcggcctggagcgaggctgggcctgggcccaggcccttggcgcgatccgcgtcaccgcccaaggcgaagaacctcaacggagggctgcggagatcggtagcgcctgctgcccccaccagttgtgacttctcaccaggagatttggtttgggccaagatggagggttacccctggtggccttgtctggtttacaaccacccctttgatggaacattcatccgcgagaaagggaaatcagtccgtgttcatgtacagttttttgatgacagcccaacaaggggctgggttagcaaaaggcttttaaagccatatacaggttcaaaatcaaaggaagcccagaagggaggtcatttttacagtgcaaagcctgaaatactgagagcaatgcaacgtgcagatgaagccttaaataaagacaagattaagaggcttgaattggcagtttgtgatgagccctcagagccagaagaggaagaagagatggaggtaggcacaacttacgtaacagataagagtgaagaagataatgaaattgagagtgaagaggaagtacagcctaagacacaaggatctaggcgaagtagccgccaaataaaaaaacgaagggtcatatcagattctgagagtgacattggtggctctgatgtggaatttaagccagacactaaggaggaaggaagcagtgatgaaataagcagtggagtgggggatagtgagagtgaaggcctgaacagccctgtcaaagttgctcgaaagcggaagagaatggtgactggaaatggctctcttaaaaggaaaagctctaggaaggaaacgccctcagccaccaaacaagcaactagcatttcatcagaaaccaagaatactttgagagctttctctgcccctcaaaattctgaatcccaagcccacgttagtggaggtggtgatgacagtagtcgccctactgtttggtatcatgaaactttagaatggcttaaggaggaaaagagaagagatgagcacaggaggaggcctgatcaccccgattttgatgcatctacactctatgtgcctgaggatttcctcaattcttgtactcctgggatgaggaagtggtggcagattaagtctcagaactttgatcttgtcatctgttacaaggtggggaaattttatgagctgtaccacatggatgctcttattggagtcagtgaactggggctggtattcatgaaaggcaactgggcccattctggctttcctgaaattgcatttggccgttattcagattccctggtgcagaagggctataaagtagcacgagtggaacagactgagactccagaaatgatggaggcacgatgtagaaagatggcacatatatccaagtatgatagagtggtgaggagggagatctgtaggatcattaccaagggtacacagacttacagtgtgctggaaggtgatccctctgagaactacagtaagtatcttcttagcctcaaagaaaaagaggaagattcttctggccatactcgtgcatatggtgtgtgctttgttgatacttcactgggaaagtttttcataggtcagttttcagatgatcgccattgttcgagatttaggactctagtggcacactatcccccagtacaagttttatttgaaaaaggaaatctctcaaaggaaactaaaacaattctaaagagttcattgtcctgttctcttcaggaaggtctgatacccggctcccagttttgggatgcatccaaaactttgagaactctccttgaggaagaatattttagggaaaagctaagtgatggcattggggtgatgttaccccaggtgcttaaaggtatgacttcagagtctgattccattgggttgacaccaggagagaaaagtgaattggccctctctgctctaggtggttgtgtcttctacctcaaaaaatgccttattgatcaggagcttttatcaatggctaattttgaagaatatattcccttggattctgacacagtcagcactacaagatctggtgctatcttcaccaaagcctatcaacgaatggtgctagatgcagtgacattaaacaacttggagatttttctgaatggaacaaatggttctactgaaggaaccctactagagagggttgatacttgccatactccttttggtaagcggctcctaaagcaatggctttgtgccccactctgtaaccattatgctattaatgatcgtctagatgccatagaagacctcatggttgtgcctgacaaaatctccgaagttgtagagcttctaaagaagcttccagatcttgagaggctactcagtaaaattcataatgttgggtctcccctgaagagtcagaaccacccagacagcagggctataatgtatgaagaaactacatacagcaagaagaagattattgattttctttctgctctggaaggattcaaagtaatgtgtaaaattatagggatcatggaagaagttgctgatggttttaagtctaaaatccttaagcaggtcatctctctgcagacaaaaaatcctgaaggtcgttttcctgatttgactgtagaattgaaccgatgggatacagcctttgaccatgaaaaggctcgaaagactggacttattactcccaaagcaggctttgactctgattatgaccaagctcttgctgacataagagaaaatgaacagagcctcctggaatacctagagaaacagcgcaacagaattggctgtaggaccatagtctattgggggattggtaggaaccgttaccagctggaaattcctgagaatttcaccactcgcaatttgccagaagaatacgagttgaaatctaccaagaagggctgtaaacgatactggaccaaaactattgaaaagaagttggctaatctcataaatgctgaagaacggagggatgtatcattgaaggactgcatgcggcgactgttctataactttgataaaaattacaaggactggcagtctgctgtagagtgtatcgcagtgttggatgttttactgtgcctggctaactatagtcgagggggtgatggtcctatgtgtcgcccagtaattctgttgccggaagataccccccccttcttagagcttaaaggatcacgccatccttgcattacgaagactttttttggagatgattttattcctaatgacattctaataggctgtgaggaagaggagcaggaaaatggcaaagcctattgtgtgcttgttactggaccaaatatggggggcaagtctacgcttatgagacaggctggcttattagctgtaatggcccagatgggttgttacgtccctgctgaagtgtgcaggctcacaccaattgatagagtgtttactagacttggtgcctcagacagaataatgtcaggtgaaagtacattttttgttgaattaagtgaaactgccagcatactcatgcatgcaacagcacattctctggtgcttgtggatgaattaggaagaggtactgcaacatttgatgggacggcaatagcaaatgcagttgttaaagaacttgctgagactataaaatgtcgtacattattttcaactcactaccattcattagtagaagattattctcaaaatgttgctgtgcgcctaggacatatggcatgcatggtagaaaatgaatgtgaagaccccagccaggagactattacgttcctctataaattcattaagggagcttgtcctaaaagctatggctttaatgcagcaaggcttgctaatctcccagaggaagttattcaaaagggacatagaaaagcaagagaatttgagaagatgaatcagtcactacgattatttcgggaagtttgcctggctagtgaaaggtcaactgtagatgctgaagctgtccataaattgctgactttgattaaggaattatagactgactacattggaagctttgagttgacttctgaccaaaggtggtaaattcagacaacattatgatctaataaactttattttttaaaaatga

SEQ ID NO: 105 - protein, 1360 aa, Homo sapiens
MSRQSTLYSFFPKSPALSDANKASARASREGGRAAAAPGASPSPGGDAAWSEAGPGPRPLARSASPPKAKNLNGGLRRSVAPAAPTSCDFSPGDLVWAKMEGYPWWPCLVYNHPFDGTFIREKGKSVRVHVQFFDDSPTRGWVSKRLLKPYTGSKSKEAQKGGHFYSAKPEILRAMQRADEALNKDKIKRLELAVCDEPSEPEEEEEMEVGTTYVTDKSEEDNEIESEEEVQPKTQGSRRSSRQIKKRRVISDSESDIGGSDVEFKPDTKEEGSSDEISSGVGDSESEGLNSPVKVARKRKRMVTGNGSLKRKSSRKETPSATKQATSISSETKNTLRAFSAPQNSESQAHVSGGGDDSSRPTVWYHETLEWLKEEKRRDEHRRRPDHPDFDASTLYVPEDFLNSCTPGMRKWWQIKSQNFDLVICYKVGKFYELYHMDALIGVSELGLVFMKGNWAHSGFPEIAFGRYSDSLVQKGYKVARVEQTETPEMMEARCRKMAHISKYDRVVRREICRIITKGTQTYSVLEGDPSENYSKYLLSLKEKEEDSSGHTRAYGVCFVDTSLGKFFIGQFSDDRHCSRFRTLVAHYPPVQVLFEKGNLSKETKTILKSSLSCSLQEGLIPGSQFWDASKTLRTLLEEEYFREKLSDGIGVMLPQVLKGMTSESDSIGLTPGEKSELALSALGGCVFYLKKCLIDQELLSMANFEEYIPLDSDTVSTTRSGAIFTKAYQRMVLDAVTLNNLEIFLNGTNGSTEGTLLERVDTCHTPFGKRLLKQWLCAPLCNHYAINDRLDAIEDLMVVPDKISEVVELLKKLPDLERLLSKIHNVGSPLKSQNHPDSRAIMYEETTYSKKKIIDFLSALEGFKVMCKIIGIMEEVADGFKSKILKQVISLQTKNPEGRFPDLTVELNRWDTAFDHEKARKTGLITPKAGFDSDYDQALADIRENEQSLLEYLEKQRNRIGCRTIVYWGIGRNRYQLEIPENFTTRNLPEEYELKSTKKGCKRYWTKTIEKKLANLINAEERRDVSLKDCMRRLFYNFDKNYKDWQSAVECIAVLDVLLCLANYSRGGDGPMCRPVILLPEDTPPFLELKGSRHPCITKTFFGDDFIPNDILIGCEEEEQENGKAYCVLVTGPNMGGKSTLMRQAGLLAVMAQMGCYVPAEVCRLTPIDRVFTRLGASDRIMSGESTFFVELSETASILMHATAHSLVLVDELGRGTATFDGTAIANAVVKELAETIKCRTLFSTHYHSLVEDYSQNVAVRLGHMACMVENECEDPSQETITFLYKFIKGACPKSYGFNAARLANLPEEVIQKGHRKAREFEKMNQSLRLFREVCLASERSTVDAEAVHKLLTLIKEL

SEQ ID NO: 106 - DNA, 764 bp, Homo sapiens
  misc_feature (639)..(639): n is a, c, g, or t
gactttttaaagaagtaagcctttatttccttgttttgcaaataaaactggctaagttggttgctttttggtgattagtcaaagagaccaaatcccatatcctcgtccgactcctccgactcttccttggcttcaaccttagctggggctgcagcagcacgaggagcagctgtggtggcagcagcacaggggcagcagcacaaaggcagatggatcagccaagaaggccttgaccttttcagcaagtgggaaggtgtaatccgtctccacagacaaggccaggactcgtttgtacccgttgatgatagaatggggtactgatgcaacagttgggtagccaatctgcagacagacactggcaacattgcggacacccaggatttcaatggtgcccctggagattttagtggtgatacctaaagcctggaaaaaggaggtcttctcgggcccgagaccagtgttctgggctggcacagtgacttcacatggggcaatggcaccagcacgggcagcagctggcaccttattggccagcaacatgtccctgatctcagtgaggtcctccttggtgaacacaaagcccacattcccccggatatgaggcagcagtttctccagagctgggttgttttccaggtngcctcggatgggcttgcgcatcatggtgttcttgccccatcagcacacagcctttccgcgaaaggacatgcggatctgctgcatctgcttggaagccacattgtctgctccacaatgaaacattt

SEQ ID NO: 107 - protein, 317 aa, Homo sapiens
MPREDRATWKSNYFLKIIQLLDDYPKCFIVGADNVGSKQMQQIRMSLRGKAVVLMGKNTMMRKAIRGHLENNPALEKLLPHIRGNVGFVFTKEDLTEIRDMLLANKVPAAARAGAIAPCEVTVPAQNTGLGPEKTSFFQALGITTKISRGTIEILSDVQLIKTGDKVGASEATLLNMLNISPFSFGLVIQQVFDNGSIYNPEVLDITEETLHSRFLEGVRNVASVCLQIGYPTVASVPHSIINGYKRVLALSVETDYTFPLAEKVKAFLADPSAFVAAAPVAAATTAAPAAAAAPAKVEAKEESEESDEDMGFGLFD

SEQ ID NO: 108 - DNA, 598 bp, Homo sapiens
cgcgctcttgacgtccggagcccctggagtaggcgcttccggccattcatactgcagtcggtcagtgttcggttgaaggattctgtgtgctgtcgtacccagagggtgacggcgccgctaggatgaagctcgtgagatttttgatgaaattgagtcatgaaactgtaaccattgaattgaagaacggaacacaggtccatggaacaatcacaggtgtggatgtcagcatgaatacacatcttaaagctgtgaaaatgaccctgaagaacagagaacctgtacagctggaaacgctgagtattcgaggaaataacattcggtattttattctaccagacagtttacctctggatacactacttgtggatgttgaacctaaggtgaaatctaagaaaagggaagctgttgcaggaagaggcagaggaagaggaagaggaagaggacgtggccgtggcagaggaagagggggtcctaggcgataatgtctctcaagatttcaaagtcatatgagatttgggatattttttgtacaggttgtgtttgtttatgtcagtttttaataaacataaatgtgggacaaaaaaaaaaaaaaaaaaaa

SEQ ID NO: 109 - protein, 119 aa, Homo sapiens
MKLVRFLMKLSHETVTIELKNGTQVHGTITGVDVSMNTHLKAVKMTLKNREPVQLETLSIRGNNIRYFILPDSLPLDTLLVDVEPKVKSKKREAVAGRGRGRGRGRGRGRGRGRGGPRR

SEQ ID NO: 110 - DNA, 662 bp, Homo sapiens
accgccgacgcagacccctctctgcacgccagcccgcccgcacccaccatggccacagttcagcagctggaaggaagatggcgcctggtggacagcaaaggctttgatgaatacatgaaggagctaggagtgggaatagctttgcgaaaaatgggcgcaatggccaagccagattgtatcatcacttgtgatggtaaaaacctcaccataaaaactgagagcactttgaaaacaacacagttttcttgtaccctgggagagaagtttgaagaaaccacagctgatggcagaaaaactcagactgtctgcaactttacagatggtgcattggttcagcatcaggagtgggatgggaaggaaagcacaataacaagaaaattgaaagatgggaaattagtggtggagtgtgtcatgaacaatgtcacctgtactcggatctatgaaaaagtagaataaaaattccatcatcactttggacaggagttaattaagagaatgaccaagctcagttcaatgagcaaatctccatactgtttctttcttttttttttcattactgtgttcaattatctttatcataaacattttacatgcagctatttcaaagtgtgttggattaattaggatcatccctttggttaataaataaatgtgtttgtgct

SEQ ID NO: 111 - protein, 135 aa, Homo sapiens
MATVQQLEGRWRLVDSKGFDEYMKELGVGIALRKMGAMAKPDCIITCDGKNLTIKTESTLKTTQFSCTLGEKFEETTADGRKTQTVCNFTDGALVQHQEWDGKESTITRKLKDGKLVVECVMNNVTCTRIYEKVE

SEQ ID NO: 112 - DNA, 5035 bp, Homo sapiens
  misc_feature (611)..(611): n is a, c, g, or t
  misc_feature (730)..(730): n is a, c, g, or t
  misc_feature (798)..(798): n is a, c, g, or t
  misc_feature (800)..(800): n is a, c, g, or t
ctgcagtcctccaaaattctaaatgtkgcmtttacctgagtggacaaggtcacagagctagtcatcacttgaatccaggccttctaattccaaatctagaacaatttattttatacttaacaagttttcattttctaacatgtatttttagatgaaaacatgcagatgtaaaccttttatatggtagcataattcttcatttttctttttcagataatactaaatacacatataccccaggatgcccaattttttactgcttacaagatattatgcgagtctgtagtgaatccagtactcattttgctacacttacagcaaggatgttaatagccttggataagtaagaaatgccgttagaagtatcttttaattaatcaaatacatgtttatagtagaaattagttgtcatagatacagacactttgagaagaaaataatgaaaataatatatgtattaaaaaatggtaagtttttcaattctaatataaaaatgaaaaacccgaagataaggttgtcctggcctgggtacagcatgttaattttatttttcagaaatggtaaacactgccctggcttaagaattaagatttacctgttatgaaactctncatttaatattgagttactcttatcagtgaagaagtcattcaacctcttatgcctttgtctttctgtaagaacaaggctaatgtccctacatctcagtagtttgaattttaacagtacntttatgttttttgaaaggagtttttattactataatggcccatacatttaaaaaattatttgctgttncnttaacaamcttttattaataaatgaagtatttgtatactgrcttgatcyttatagatcatatgaacatattatcacatgtgcccctaaagtatgtacagtattatgcatgtttttttgttaaaaaaatcaatttgcaatataaataaattttaaaaataataaagtacttaactaacactaaattaaaattataaaaatctgaaggtaatattcacaagtgtcatatatcagagttagatagtaatctatctttttcatcttcactttcgaatggctacttctacctgtttttttattttgccargtggttagatgaacgtcatgcacaatctcactttattccagctttattccgaccttctcctcttgagcggataaaaactaatgtcataaatcctgcatatgctactgartcaggtcagacagaaaactcactacatatgggctatagtgcactagaaataaagagtaaaatgttagccctagagaaagcagatacctgtatttacaaccctttgtttggatcagatcttcagtatacaaatcgggtaagagtgaatgayttagctctgatttaaaagacgttttatctcaagtgtaattttttttcctgagatatatacatctattactaattataaacatgaaggcctggtacagtggctcacgcctgtaatcccagcactttgggaggccaaggagggcagattgcctgaggtcaggagttcgagaccagcctggccaacatggtgaaatctcgtctctactaaaaatacaaaaattagctggatgtggtggcgtacccctgtagtcttagctaccccggaggactgaggcaggagaatcgcttgaacctgggaggcggaggttgcagtgtgctgagatcgcagcactgaactccagcctgggcaacagagcaagactcattctcaataaataaataagtaaaaatttaaaatataaacatgtaaacattaagatgacaaagctcttaatgggtttttgttattgttttccctttctaggtagataaagtggtaataaatccatactttggtctaggagctccagactactcaaaaatccaaatacctaaacaggaaaaatggcagagaagcatgagcagtgtcacagaagacaagtactgtttcggttttactccacattgcttttataaaaacttacattctaatttaaagtattgtttaaaattatatatgcaatttgtatgcattgtagtcactattgagtttacagcttcttagtgatacagagctttcatagatgtgtcacatttcttttgaaacaatttttactgtcctgttgtggccctcaaaatcgaacgacagtgggtagatgattttcctctccaccgaagcgcctgtgaaggagattcagaattactaagccgtcttctcagtgaaagattttcagtcaaccagttagatagtgaccactgggcacccattcattatgcatgctggtaaatggaatatttattcttttctttttagaaagaatacattttttattataaatgttagtgcttcttttcaagactgttctcattccaaatactttttctctacctgtttgccttaggagttttctgttttgatcttagatgattgtatatgtgccaatgttcagaattgtaaggtctgccctatggggaacgtactgttagtgtccttaggcattgccaggtcatatagtaggatacttaatgactagtaaatgtcactgtagagtacaaggtcacttattcacccttgcagtttctcttgttttgcagtttctcttgttttgtattgggattatgttatgcttatctttactggaagtttgcatgtgttaactacttacgatttgaccttgcgtcttgctataaaagtatccttttagtgctttgagaaactggttatcaagaagccctcaaaagccttcattagaaccacagctttccattatgttagatactagtgttgggacaggattggggttagctctttccactagttgcccagtgtagctcttggtctcctctcacataattatttttcccctcagttgggctgagttgttagtgtttagagtagtagttaactgtttactataagtcatcttctagaaaggatataataaagttttttacattatttctgtgggaaagttgctyttcacmtatksyytaaagtaagcttccttggctaawttaagaggtaccggccaggtgcagtggctcacacctgtaatcccagcactttgggaggccgaggcaggtggatcacgaggtcaggagatcaagaccatcctggctaacatggtgaaaccccgtctccactaaaaatacaaaaattagccgggcgtggtggtgcacgcctgtaatcccagctacttgggaggctgaggcaggagaatagcttgaaccagggaggcagagattacagtgagctgagattgcaccaccgcactccagcctggtgacagagtgagattccatttcaaaaaaaaaaaaaaaaagtaccacattatttattgccttgttaaatgtccacagtgtcttagttgtattagattgagcaaggtaattcactttacctctctgcatctcagcttatttatccatatataaaatgcagtagatcatttctagagtttcttccaactcgaaattctttttgatttatctgatttttaatatttgtwatccaagcarttaactatagttgccttmamagtgtgtgtgtgtgtgtgttkwrtrwrwrwaaaaaaagatcttttttctgtttccttaaaaatatgctcttatatttcttattacatggaatttttgtattaagagttactctaattgtctttaactgagttaatagttgtttctttagattaccagaaaatactggcggcaaaaacaatactaaaagaaatcacatgcagccgggtgcagtggctcacacctgtaatcccagcactttgggaggccaaggtgggcggatcacgaggtcaggaggttgagaccatcctggctaacaccatgaaatcccgtctctattaaatatacaaaaaattagccgggtgtggtggcgggtgcctgtagtcccagctacttgggaggctgaggcaggagaatggtgtgaacccgcgaggcggagcttgcagtgagctgagatcacgccactgcactccagcctgggcaacacagtgagactccatctcaaaaaaaaggaaaaaaagaaatcacatgctttaccaggagctaaataaaaagaggtagagaatatagttcagattccaaaaaagtatactatagatttggaaaaggcaaaggcagtgaattttagttgaagaatcccaagtttatatttgactgtatagttgctcctttttgtggcacggggtgttttttttttttcccctctaatgaaagaatggtaatattttcaactattacataaaaacaaaagcatggcattgtatttaatatgctttggaatgtactatgtttcagtaccatttttagttcctaaaatatacctttggtaagttactttatgtctctaagggtctgtttctttatctatacgagatgggcttaaaaatggtaccttccctaatagtaaaagaaaaattaacaagtaacgtgctttgagagcacataatgagcactcaataaatcttggcttttaagaataagtgttggccgggtgtagtggcccacacctgtaatcccagcactttggaaggccaagaagggcagatgactggaagtcaggagtttgagaccagcctgccctggtgaaactctgtctctactgaaaatacaaaaattagctgggcgtggtggcaggcacctgtaatcccagctgctcgggaggctgaggcaggagaatcgcttgagcccaggaggtggaggttgcagtgtactgagatcccaccaccgcactccagcctgggcgactgagtgagactacatctcaaaaaataaaataaaaaaataaatattgtaaaaatgtaaagattttgatgtctgaatctaaaatttattaatctgtaatattttcatttgcaaatttttgttacttgagtatgccaaggaaaagagttttatacttggataaattaattttctgtcagcttgataatcaagtttaatgtaacaggagtagtatgggtcaccttgcaataccattagttggatgcctcatttaattggccccattcactggcaaaa

SEQ ID NO: 113 - protein, 123 aa, Homo sapiens
MGYSALEIKSKMLALEKADTCIYNPLFGSDLQYTNRVDKVVINPYFGLGAPDYSKIQIPKQEKWQRSMSSVTEDKERQWVDDFPLHRSACEGDSELLSRLLSERFSVNQLDSDHWAPIHYACW

SEQ ID NO: 114 - DNA, 1880 bp, Homo sapiens
acaagaatgaatgaatgtctttgtcttaaattttgcccatgtgttaaaagatgtaattctcagaatgggagagaaatgactacctttgttcctactcttttatataattatccttttagggaaagacttggtcaactctaatatatctagaaggaagactatatctggtgtagactaatatgagatgttttagaagagttaacctgaacactttgagggagagattattcttgccagcaaaaagctagccaggaatgagcctaccacattatttgagaatatcaaacctcaggcctggggggttgaggggaagaagattaccagaagtgcaggaaagagaagtttgaggaacacccttggcttagcaacatgtgataatgcaaagctgttataacctgttaatcctacgtactatgtgttctgtacctttacatgtttttaaatttaagatagtttgtaagaactgtacaaaaaaatgcttctggagatttctttggcagaaatgcctttcatctataatttcatggagaactgctttaattagcctaggtgaaaagtagtcctagcagtgtaaatatgtataattagagttttctaatttcactgtgagatctctaacttttgagtggcaaacagatcaagtcttttgctcatagacttttctgtggggttattaaaatgcaaaagctttattttttttaataatgccatactccattagtgtcagatgatggtatggaatttgttcccttgctttcccccactgttactgcttcagtttatagattgccagcagagttcagaaatagagcagggatttacccgttctttgcttggacatcccattttcttttgtccagacccatgttggcaatcatgtatgaactgtgttatacttctcagtgctttcttttttctttttgataagatggatatcaaaaatagttgctgtgcaaaagttagtagtcttcttcaagaagaaaaccaattctttttctaataatatcctgtgaaattgcttcattcattcatttatttttaagccaaatgtcagcagagtgctgctgcttttatctagtaattttgatatgtaagtattaatgcatttttaaaagatgtctacattgaaacatgttcttcccagtgtcctgcttatgatgctttgttcagattttttgtaagagaccagttagtacactgggggtgtatattgtgtacatgtgtcattttagttaggcattgtaggccaaatgtgattataaatgaagttgatgaacattaattttgttattagtgagttttttgaattgtaaatggatttccagtttaccttctgttgtctacagcttttttaattttaaggtttgactaattgtatccatctcattgtacagtgttttagttgcaagcagaaagtagaatttggtataaagcaggttatttctatattgaaaggagtacagttgaaattgtagatttaagattgttaaaatcatgacaattctaacttgtctattctaacctattgtgtacaatctgattttttaaaattgtaaacatgtatgatcttggtttcatgtgtttttgaaagtgttattgtttaaaaaatgaaaaaagcatatctgctaaagagctgtcagttttcattactgactctgtaaaatacactgttctttgtgtactgtgtgttattttgccagctgctgcattagccttcaaaagtatttggaaacttaagatgaactacatttcttgcaaagtacattcctttctgtggtattttgtcctgtaactgaagtatagtaattattttatggaaatgttagcaattctgtaccaactttgaataaaatgaaaaatttaaaaaaaaaaaaaaaaaa

SEQ ID NO: 115 - protein, 125 aa, Homo sapiens
MPRYELALILKAMQRPETAATLKRTIEALMDRGAIVRDLENLGERALPYRISAHSQQHNRGGYFLVDFYAPTAAVESMVEHLSRDIDVIRGNIVKHPLTQELKECEGIVPVPLAEKLYSTKKRKK

SEQ ID NO: 116 - DNA, 2703 bp, Homo sapiens
ggacgccgcgcggggcagtgtgggactggggcggaacgccgcccggccgcgggtcgggctctgtgtcagcagccgggcgggcgctcgggcgggacatggcagcctgtacagcccggcgggccctggccgtgggcagccgctggtggtcccggtcgctgactggggcccggtggccaaggccgctctgtgcggcggccggagctggagccttctcgccagcgtcgaccacgacgacgcggaggcacctctcgtcccgaaaccgaccagagggcaaagtgttggagacagttggtgtgtttgaggtgccaaaacagaatggaaaatatgagaccgggcagcttttccttcatagcatttttggctaccgaggtgtcgtcctgtttccctggcaggccagactgtatgaccgggatgtggcttctgcagctccagaaaaagcagagaaccctgctggccatggctccaaggaggtgaaaggcaaaactcacacttactatcaggtgctgattgatgctcgtgactgcccacatatatctcagagatctcagacagaagctgtgaccttcttggctaaccatgatgacagtcgggccctctatgccatcccaggcttggactatgtcagccatgaagacatcctcccctacacctccactgatcaggttcccatccaacatgaactctttgaaagatttcttctgtatgaccagacaaaagcacctccttttgtggctcgggagacgctaagggcctggcaagagaagaatcacccctggctggagctctccgatgttcatcgggaaacaactgagaacatacgtgtcactgtcatccccttctacatgggcatgagggaagcccagaattcccacgtgtactggtggcgctactgtatccgtttggagaaccttgacagtgatgtggtacagctccgggagcggcactggaggatattcagtctctctggcaccttggagacagtgcgaggccgaggggtagtgggcagggaaccagtgttatccaaggagcagcctgcgttccagtatagcagccacgtctcactgcaggcttccagtgggcacatgtggggcacgttccgctttgaaagacctgatggctcccactttgatgttcggattcctcccttctccctggaaagcaataaagatgagaagacaccaccctcaggccttcactggtaggccagctgaggccccaagtgcccaggcttggtcaccgggaagaacaactctcatcccacaattgctgcagaactcttctctccccatcatgggccacagtgggtctcttaatttgattgtggggttctttttgtggggaggggtggtataacttttcttcagaagacccatgtgggacacctccaaggctggcctcctcataagccctgcctacaccatgttccagtaaacctctccaccaaggaactgtgttcagctgccacaggcctggaggagtttcctggcctgtcacgtgaggtttgatcagtaaaccagtgcacgcttggccacccttgccatttctgctcccagagtctcaggctccccttctgacccagtgtgcgcccttgactgctttctttgctgcccttccagggagctgcccccctggtagggcatgtgcctgtttccctctcagcctggaggctggctggacatctcctagggtcactgtgcctctcagctagttggcgggggtgctggactggactcttgttcactttaccttctgccaaatgcagagagggaggccagtgtcagggtcggagtggcctggctcttagcactgaccgaccattgccatttctggcctcgctaggcccaggagaggagggaggcaagccagtcgggtttcctggagcaatgggtgtgccagccctcagcatgactctgccaagcatccagaccacaaatgcaggaatttggctgaggagcagctttaggtatggattgatgactaagtcaagctacttcctgagcttctctcagatttccaagagccagagatgaattgtgctgcatcttgccccaattcttaggatttcttttcctccgccactgcagtgattgttagaggtagttttcttgaattaatattaaatcacagttccagcccttgttattcttgtccttagtcctccagggggagctggggttgcagggcaacagtacagtcgcgcttacgacctggctagaacacaaggtcagatgataaacagaagcacaggaactcagcccatggccgcaagctggtcaaggcctgctcactgtaaacatggctctgtaccattgagtttaacacaattttattagaaattagtgtttgcttccatcacttatgctgagcaaccaaatattacagttatgtgataaaggaaaaattctttcctgcccaggacctgcgccatcctttaggccgaccttggtcacataccaaattcaataaaacccaatactggcctgtgttgttaacagcaggctgccaggtttctcagaaactgacaagaaaatctgaccttcatccatactttgtttacttacccctgggctgcttggagttgaaaaatgcacacagccaagagttgctttctgaatagggctggaaactttcaaagaaaacccccaaacttttaagtcacaaagtctgattaaagaagctaagatcaaaaaaaaaaaaaaaaaa

SEQ ID NO: 117 - protein, 368 aa, Homo sapiens
MAACTARRALAVGSRWWSRSLTGARWPRPLCAAAGAGAFSPASTTTTRRHLSSRNRPEGKVLETVGVFEVPKQNGKYETGQLFLHSIFGYRGVVLFPWQARLYDRDVASAAPEKAENPAGHGSKEVKGKTHTYYQVLIDARDCPHISQRSQTEAVTFLANHDDSRALYAIPGLDYVSHEDILPYTSTDQVPIQHELFERFLLYDQTKAPPFVARETLRAWQEKNHPWLELSDVHRETTENIRVTVIPFYMGMREAQNSHVYWWRYCIRLENLDSDVVQLRERHWRIFSLSGTLETVRGRGVVGREPVLSKEQPAFQYSSHVSLQASSGHMWGTFRFERPDGSHFDVRIPPFSLESNKDEKTPPSGLHW

SEQ ID NO: 118 - DNA, 3495 bp, Homo sapiens
gcaaattcagagacacacataagaaactggaagaagagaaaggcaaaaaggaaaaagaaagacaggaaattgagaaagaacggagagaaagagagagggagcgtgaaagggaacgagaaaggcgagatcgtgaccgggatagagaaaggagctcagatcgtaataaggatcgcagtcgatcaagagaaaaaagcagagatcgtgaaagggaacgagagcgggaaagagagagagagagagaacgagagcgagaacgagaacgggagcgagagagagagcgagagagggaacgggagcgagaaaaaaaaaaaaaaaaaacggaagcagaggagcaggaaactgggtcccttgaagaatctacagatgagtctgaggaagaagagagcgaagaggaacccaagctgaagtatgaaaggctttccaatggggtaactgaaatacttcagaaggatgcagctagctgcatgacagtccatgacaagtttttggcattgggcacacattatggcaaggtttatttacttgatgtccaggggaacatcactcagaagtttgatgtagtgcaggtatttggactgtattctggagaagaatttcacgagacttttgactgtcccattaaaattattgctgtgcacccacatttcgtgagatccagttgcaagcagtttgtgaccggagggaagaagctgctactgtttgaacggtcttggatgaacagatggaagtctgctgttctgcatgaaggggaagggaacataaggagtgtgaagtggagaggccatctgattgcttgggccaataatatgggtgtgaagatttttgacatcatctcaaagcaaagaatcaccaatgtgccccgggatgatataagtcttcgcccagacatgtatccctgcagcctctgctggaaggacaatgtgacactgattattggctgggggacttctgtcaaggtgtgctcagtgaaggaacggcatgccagtgaaatgagggatttgccaagtcgatatgttgaaatagtgtctcagtttgaaactgaattctacatcagtggacttgcacctctctgtgatcagcttgttgtactttcgtatgtaaaggagatttcagaaaaaacggaaagagaatactgtgccaggcctagactggacatcatccagccactttctgagacttgtgaagagatctcttctgatgctttgacagtcagaggctttcaggagaatgaatgtagagattatcatttagaatactctgaaggggaatcacttttttacatcgtgagtccgagagatgttgtagtggccaaggaacgagaccaagatgatcacattgactggctccttgaaaagaagaaatatgaagaagcattgatggcagctgaaattagccaaaaaaatattaaaagacataagattctggatattggcttggcatatataaatcacctggtggagagaggagactatgacatagcagcacgcaaatgccagaaaattcttgggaaaaatgcagcactctgggaatatgaagtttataaatttaaagaaattggacagcttaaggctattagtccttatttgccaagaggtgatccagttctgaaaccactcatctatgaaatgatcttacatgaatttttggagagtgattatgagggttttgccacattgatccgagaatggcctggagatctgtataataattcagtcatagttcaagcagttcgggatcatttgaagaaagatagtcagaacaagactttacttaaaaccctggcagaattgtacacctatgataagaactatggcaatgctctggaaatatacttaacattaagacataaagacgtttttcagttgatccacaagcataatcttttcagttctatcaaggataaaattgttttattaatggattttgattcagagaaagctgttgacatgcttttggacaatgaagataaaatttcaattaaaaaggtagtggaagaattggaagacagaccagagctacagcatgtgtatttgcataagcttttcaagagagaccaccataaggggcagcgttaccatgaaaaacagatcagtctttatgctgaatatgatcgaccaaacttacttccctttctccgagacagtacccattgcccacttgaaaaggctcttgagatctgtcaacagagaaactttgtagaagagacagtttatcttctgagccgaatgggtaatagccgaagtgccctgaagatgattatggaggaattacatgatgttgataaagcaatcgaatttgccaaggagcaagatgatggagagctgtgggaagatttgattttatattccattgacaaaccaccatttattactggcttgttaaacaacattggcacacatgttgacccaattctactgattcaccgtattaaggaaggaatggagatccccaatttgagagattccttggttaaaattctgcaagactacaatttgcaaattctgcttcgtgaaggctgcaagaagattctcgtagctgactctttgtccttactgaagaaaatgcaccgaactcaaatgaaaggtgttcttgttgatgaggagaacatctgtgagtcgtgcctttcccctattcttccatcagatgcagctaagcccttcagcgtggtggtcttccattgccggcacatgttccacaaggagtgcctgcccatgcccagcatgaactctgctgcacagttctgcaacatctgcagtgctaagaaccgtggaccaggaagtgcaattttggagatgaaaaaatagctcatttctccttgtcagtctccttgtcaccactctttttgagactgtttttgcaacaacaaaagcatttgttgacactcgtgctgttaagagatttgtttatgtttatattatactcaaaaacaatttcttcatctattcctgtactaatggtttctctttgcagttcacagagaatttggggctctcttcatgccttgaaattttggggtccatagtgaatattttgttatttatttgtttggctcattctttatatagtaatggaaacataagtctaggagttagaaatgaattttttagaccttagtaaaaccatttaaccataaaatggacaactgagaattctcccagctgcctgaaagcgtcgccaactgtggttatcctgcaagctgctacctgcaacttggacgttgtttccacgtgctctgctggctacgattcttgcattctgggtttggcttttttctgtgtcatcaactatggttatcctctaaataggcatttaatgaaacattgtacaaattgtcactcatttgatgacacctgggaataacattagcaggctgatgtcctgcaccattatgtttactaatcacatgttctgtgtgctgtgacgactgtcaaagagtatctggccatggcggacactcagcatttgttgattgaataaatgttagctcttctcatt

SEQ ID NO: 119 - protein, 779 aa, Homo sapiens
MTVHDKFLALGTHYGKVYLLDVQGNITQKFDVVQVFGLYSGEEFHETFDCPIKIIAVHPHFVRSSCKQFVTGGKKLLLFERSWMNRWKSAVLHEGEGNIRSVKWRGHLIAWANNMGVKIFDIISKQRITNVPRDDISLRPDMYPCSLCWKDNVTLIIGWGTSVKVCSVKERHASEMRDLPSRYVEIVSQFETEFYISGLAPLCDQLVVLSYVKEISEKTEREYCARPRLDIIQPLSETCEEISSDALTVRGFQENECRDYHLEYSEGESLFYIVSPRDVVVAKERDQDDHIDWLLEKKKYEEALMAAEISQKNIKRHKILDIGLAYINHLVERGDYDIAARKCQKILGKNAALWEYEVYKFKEIGQLKAISPYLPRGDPVLKPLIYEMILHEFLESDYEGFATLIREWPGDLYNNSVIVQAVRDHLKKDSQNKTLLKTLAELYTYDKNYGNALEIYLTLRHKDVFQLIHKHNLFSSIKDKIVLLMDFDSEKAVDMLLDNEDKISIKKVVEELEDRPELQHVYLHKLFKRDHHKGQRYHEKQISLYAEYDRPNLLPFLRDSTHCPLEKALEICQQRNFVEETVYLLSRMGNSRSALKMIMEELHDVDKAIEFAKEQDDGELWEDLILYSIDKPPFITGLLNNIGTHVDPILLIHRIKEGMEIPNLRDSLVKILQDYNLQILLREGCKKILVADSLSLLKKMHRTQMKGVLVDEENICESCLSPILPSDAAKPFSVVVFHCRHMFHKECLPMPSMNSAAQFCNICSAKNRGPGSAILEMKK

SEQ ID NO: 120 - DNA, 1040 bp, Homo sapiens
ttttttcctattgttaccctctttattccaaaacaattacacatttcaacttttcaaaagcaacatctgggtaagttaggaatattcacagcttcttacacagtgtcagagaaagagactatctgagctcaccaggtatctgctgtgtgttggggaaactgaaaaacaagcaaaagtataactacaatctggacttttttcttttttaaataaagttttttttttccatttttcttctcatactgtgaattgttcttgactccttttcttgacattcagttttcagaatttccatctttcttctggaactaatgtgctgttcgtagtgtcctatattttgccaatctactgctctgctctgcgcgatcctcttgactgcctgckgggccagcatccgattgccagccagaracgtcacactgcccaagakggccaggtacttcaaggkctggracatgttgagctgrgtccagtagacatacatgrgtcccagcatagcagcatgtcccaggtgaaatataatcgtgctaggrgcaaaagtgaagttggrgacattggcaccaatccggatccacagagcgaagagcagaagcaacggcgagaggrtcagggcagtgaatgtattggacaccacggtggggggcctcttctcaggctcgcggaamaggtgctgaatttcctgttttggagtgaaaaggttctgggacaagacagtygagggagcttcttcctcagggaacttgatgaccacatcagccacattccagaggattgggttcttcaaagtggcatctccaatgattaagtagagagtgtaggtgccagaggcagagtcaaattcaatctttctttcagaggtatccagttcaaacttgtacacgttcttgttgtctggctcggcamaaacaccacttcctggcagtyttctggttatggagtcggacaatgtctggtgrgrgtgagtcagcmcagtgttcmmtctacagctggagaamaggsgagtctggtggyktttssatgatgtgccctgstttggtggg

SEQ ID NO: 121 - protein, 631 aa, Homo sapiens
MAPPGSSTVFLLALTIIASTWALTPTHYLTKHDVERLKASLDRPFTNLESAFYSIVGLSSLGAQVPDAKKACTYIRSNLDPSNVDSLFYAAQASQALSGCEISISNETKDLLLAAVSEDSSVTQIYHAVAALSGFGLPLASQEALSALTARLSKEETVLATVQALQTASHLSQQADLRSIVEEIEDLVARLDELGGVYLQFEEGLETTALFVAATYKLMDHVGTEPSIKEDQVIQLMNAIFSKKNFESLSEAFSVASAAAVLSHNRYHVPVVVVPEGSASDTHEQAILRLQVTNVLSQPLTQATVKLEHAKSVASRATVLQKTSFTPVGDVFELNFMNVKFSSGYYDFLVEVEGDNRYIANTVELRVKISTEVGITNVDLSTVDKDQSIAPKTTRVTYPAKAKGTFIADSHQNFALFFQLVDVNTGAELTPHQTFVRLHNQKTGQEVVFVAEPDNKNVYKFELDTSERKIEFDSASGTYTLYLIIGDATLKNPILWNVADVVIKFPEEEAPSTVLSQNLFTPKQEIQHLFREPEKRPPTVVSNTFTALILSPLLLLFALWIRIGANVSNFTFAPSTIIFHLGHAAMLGLMYVYWTQLNMFQTLKYLAILGSVTFLAGNRMLAQQAVKRTAH

SEQ ID NO: 122 - DNA, 2913 bp, Homo sapiens
gggggagcccctgcaagtttcccgggccgcgcgccgcgctcgctcgcctcccagcccgcggcccgagccgccgccgcgcccgccatgccctcggccaaacaaaggggctccaagggcggccacggcgccgcgagcccctcggagaagggtgcccacccgtcgggcggcgcggatgacgtggcgaagaagccgccgccggcgccgcagcagccgccgccgccgcccgcgccgcacccgcagcagcacccgcagcagcacccgcagaaccaggcgcacggcaagggcggccaccgcggcggcggcggcggcggcggcaagtcctcctcctcctcctccgcctccgccgccgctgccgccgccgccgcctcgtcctcggcgtcctgctcgcgcaggctcggcagggcgctcaactttctcttctacctcgccctggtggcggcggccgctttctcgggctggtgcgtccaccacgtcctggaggaggtccagcaggtccggcgcagccaccaggacttctcccggcagagggaggagctgggccagggcttgcagggcgtcgagcagaaggtgcagtctttgcaagccacatttggaacttttgagtccatcttgagaagctcccaacataaacaagacctcacagagaaagctgtgaagcaaggggagagtgaggtcagccggatcagcgaagtgctgcagaaactccagaatgagattctcaaagacctctcggatgggatccatgtggtgaaggacgcccgggagcgggacttcacgtccctggagaacacggtggaggagcggctgacggagctcaccaaatccatcaacgacaacatcgccatcttcacagaagtccagaagaggagccagaaggagatcaatgacatgaaggcaaaggttgcctccctggaagaatctgaggggaacaagcaggatttgaaagccttaaaggaagctgtgaaggagatacagacctcagccaagtccagagagtgggacatggaggccctgagaagtacccttcagactatggagtctgacatctacaccgaggttcgcgagctggtgagcctcaagcaggagcagcaggctttcaaggaggcggccgacacggagcggctcgccctgcaggccctcacggagaagcttctcaggtctgaggagtccgtctcccgcctcccggaggagatccggagactggaggaagagctccgccagctgaagtccgattcccacgggccgaaggaggacggaggcttcagacactcggaagcctttgaggcactccagcaaaagagtcagggactggactccaggctccagcacgtggaggatggggtgctctccatgcaggtggcttctgcgcgccagaccgagagcctggagtccctcctgtccaagagccaggagcacgagcagcgcctggccgccctgcaggggcgcctggaaggcctcgggtcctcagaggcagaccaggatggcctggccagcacggtgaggagcctgggcgagacccagctggtgctctacggtgacgtggaggagctgaagaggagtgtgggcgagctccccagcaccgtggaatcactccagaaggtgcaggagcaggtgcacacgctgctcagtcaggaccaagcccaggccgcccgtctgcctcctcaggacttcctggacagactttcttctctagacaacctgaaagcctcagtcagccaagtggaggcggacttgaaaatgctcaggactgctgtggacagtttggttgcatactcggtcaaaatagaaaccaacgagaacaatctggaatcagccaagggtttactagatgacctgaggaatgatctggataggttgtttgtgaaagtggagaagattcacgaaaaggtctaaatgaattgcgtgtgcagggcgcggatttaaagtccaatttctcatgaccaaaaaatgtgtggttttttcccatgtgtcccctaccccccaatttcttgtcccctcttaaagagcagttgtcaccacctgaacaccaaggcattgtattttcatgcccagttaacttatttacaatatttaagttctctgcttctgcatttggttggtttcctgaagcgcagcccctgtgaataacaggtggcttttcatggatgtctctagtcagagaaaaatgataaaggcttaaattgaggattaacagaagcagattaacctcagaaatcctgtctggctggcagatttcaagtaaaaaaaaaaaaaaggtgggttggggggacccttttctttctagttgtctttaaggaaaattaattttacttttttttttgttctggccgaaatttttatgagatatctctcacttgtcttccactttgaaccggttaaagctcatagctgtcagctctgaatgaggaggggagaagcccctgggtctttctttgaaaggaatccgctgcttgagggctgcctccctcatggtgtgcgtgtcgttctcttcctgacgcatctgtgatatcagaggtaactatgcaaagcatccaggcggttctgaatgtgaagcactacacccagcagagtcccggtgccctctgtccccactgccggcccatgtcctctctccggaggtcaccaaggaatgcacaggtttcgactaccagaaaggggagtccttgggttctttcaaaaaattcgtgaggagagctgtctacagtggaatagggggtctccctggggaatgcaggccaagtccttttattttaacatgatgtccatgaagaggtttgccgtctgggcagccctgtcggcaaggagcgtgcatactgcgtttgtgtaattgtttgctgtatctcccttccctctgagctgtattgttctttaatggctgtcttgcccttccaaaaaaaattgaaaaaaaaaaaa

SEQ ID NO: 123 - protein, 602 aa, Homo sapiens
MPSAKQRGSKGGHGAASPSEKGAHPSGGADDVAKKPPPAPQQPPPPPAPHPQQHPQQHPQNQAHGKGGHRGGGGGGGKSSSSSSASAAAAAAAASSSASCSRRLGRALNFLFYLALVAAAAFSGWCVHHVLEEVQQVRRSHQDFSRQREELGQGLQGVEQKVQSLQATFGTFESILRSSQHKQDLTEKAVKQGESEVSRISEVLQKLQNEILKDLSDGIHVVKDARERDFTSLENTVEERLTELTKSINDNIAIFTEVQKRSQKEINDMKAKVASLEESEGNKQDLKALKEAVKEIQTSAKSREWDMEALRSTLQTMESDIYTEVRELVSLKQEQQAFKEAADTERLALQALTEKLLRSEESVSRLPEEIRRLEEELRQLKSDSHGPKEDGGFRHSEAFEALQQKSQGLDSRLQHVEDGVLSMQVASARQTESLESLLSKSQEHEQRLAALQGRLEGLGSSEADQDGLASTVRSLGETQLVLYGDVEELKRSVGELPSTVESLQKVQEQVHTLLSQDQAQAARLPPQDFLDRLSSLDNLKASVSQVEADLKMLRTAVDSLVAYSVKIETNENNLESAKGLLDDLRNDLDRLFVKVEKIHEKV

SEQ ID NO: 124 - DNA, 2606 bp, Homo sapiens
gagggacccgcgtccagatcttcagtgtctattggatttttccaagagaaagtttgtaaaattccttacactgtagatgtggatcagatacgatgattcagtagaagagcacatgtcaggggcagtggaggctggctgctgaaggatgaacggagaggaagaattctttgatgccgtcacaggctttgattctgataactcttctggggaattttcagaggcaaatcagaaagtcacgggaatgattgacttagacaccagcaaaaataataggattgggaaaactggggagaggccctctcaagagaacggaattcagaaacacaggacatcgctgccggctcccatgttcagcagaagcgacttcagcgtgtggaccatcctgaagaagtgtgttggcctggagctgtccaagatcacgatgccaatcgccttcaacgagcctctgagcttcttgcagcggatcacggagtacatggagcacgtgtacctcatccacagggcctcctgccagccccagcccctggagaggatgcagtctgtggctgcttttgctgtttcggctgtggcttcccagtgggagaggaccggcaaaccatttaatccactcttgggagaaacgtatgaattaatcagggaagatttaggattcagatttatatcggaacaggtcagtcaccacccccccatcagtgcgttccactcggaaggtctcaaccatgacttcctgttccatggctccatctaccccaagctcaagttctggggcaaaagcgtggaggcggagccccgaggcaccatcaccctggagctgctcaaacataatgaagcctacacctggaccaaccccacctgctgcgtccacaacgtcatcatcgggaagctgtggatagagcagtatgggacagtggagattttaaaccacagaactggacataagtgtgtgcttcactttaaaccgtgtggattatttggaaaagaacttcacaaggtggaaggacacattcaagacaaaaacaaaaagaagctctttatgatctatggcaaatggacggaatgtttgtggggcatagatcctgtttcgtatgaatccttcaagaagcaggagaggagaggtgaccacctgagaaaggccaagctggatgaagactccgggaaggctgacagcgacgtggctgacgacgtgcctgtggcccaggagaccgtgcaggtcattcctggcagcaagctgctctggaggatcaacacccggccccccaactctgcccagatgtataatttcaccagtttcactgtgagcctcaacgagctggagacaggcatggagaagaccctgccacccacggactgccgcctgcgccctgacatccgcggcatggagaatggcaacatggatctggccagccaggagaaggagcggctggaggagaagcagagagaagcacggagggagcgggccaaggaggaggcagagtggcagacgaggtggttctacccaggcaataacccctacactgggacccccgactggttgtatgcaggggattactttgagcggaatttctccgactgcccagatatctactgagggcctggaggggcctggggcccgggaccggaggctgacgaggctggacttcctcgagtggccactgtgagcctcgtcacagcagaaaccaacttttctaacgactgagttcgcggagatagcatcatccctgatcaaggatgtaattctaattaactgttgattgccaaacatttcactctgctgtgccgtctcttcataaagcttcacttgggatcatcgtcttcattaaggtttcaacagggaaattcttcacggcgcccttttatgtggcagaaatcagctggggcttgtttagcttccagcacactctcagtcatagcatgtgtagctaaaggaagtaatgggaaggggttcatgttctctttataatgcagtggcaaaaggttctgaaaaccttttaaactcgaaccagtgggggaaagatggatcttgaagctaatcctgcagagagttttatagaggccagggattgccttctaaattatgataaaacagaagtgaagagtttcagagcatcagattgagtgaaaagttgtcagattctgtattttttaacaatcttcaataatgtaaagattacttttaaaatatttaagttaaaactacttgaatagtattttgctgaagagcaagatatgcattaatcaccggttttatactgtccaaaatgaagcatccccgtgacaaaccagagtgggcagaagcatcgagagcgtgacaggaaatcccaagactgcttccgcctcagaggcgtcccggctgcgattcgctgccctgttgtcagtgaggcctggctgtcaccgcacaccgcgtccgtgtctccagggggttcctttcttctcacacgtcgcgtgtacccatagcactcttgtgtttctgtttttcccagtatgcatgtttaaaatagaagtgacaagaatcacatccggttgtgtcctgtgggagggtcagaggcagaatctacttacagtggtgtaattaaagttatttaaccaaaaaaaaaaaaaaaaaaaaa

SEQ ID NO: 125 - protein, 480 aa, Homo sapiens
MNGEEEFFDAVTGFDSDNSSGEFSEANQKVTGMIDLDTSKNNRIGKTGERPSQENGIQKHRTSLPAPMFSRSDFSVWTILKKCVGLELSKITMPIAFNEPLSFLQRITEYMEHVYLIHRASCQPQPLERMQSVAAFAVSAVASQWERTGKPFNPLLGETYELIREDLGFRFISEQVSHHPPISAFHSEGLNHDFLFHGSIYPKLKFWGKSVEAEPRGTITLELLKHNEAYTWTNPTCCVHNVIIGKLWIEQYGTVEILNHRTGHKCVLHFKPCGLFGKELHKVEGHIQDKNKKKLFMIYGKWTECLWGIDPVSYESFKKQERRGDHLRKAKLDEDSGKADSDVADDVPVAQETVQVIPGSKLLWRINTRPPNSAQMYNFTSFTVSLNELETGMEKTLPPTDCRLRPDIRGMENGNMDLASQEKERLEEKQREARRERAKEEAEWQTRWFYPGNNPYTGTPDWLYAGDYFERNFSDCPDIY

SEQ ID NO: 126 - DNA, 328 bp, Homo sapiens
ttggagaaggggtgactgggagaggaaggaccctctggtgagatgactcagggaggctgtgagcctctcccttgggtgattttcacactgggtgcagaattccctgtaccccacactgagaaccccggggaggctagcaatttatgtgagaaaaaaaatgagataaaacaagatttctggttgtcaatgaggatatttattggggtttcatgagtgcagggagaagggctggatgacttgggatggggagagagacccctcccctgggatcctgcagctccaggctccctgggtggggttagagttgggaacctatgaacattctgta

SEQ ID NO: 127 - protein, 236 aa, Homo sapiens [sequence omitted]

SEQ ID NO: 128 - DNA, 2222 bp, Homo sapiens
gagtcccggcagtgcgggactccggtagccgcccctccggtagccgcccctcctccccccgcgccgccgccctatatgttgcccgccgcggcctctggggcatggagcacgctgcccagccctggcgatggcaacggcgacgggggtggcggaggagcgcctgctggccgcgctcgcctacctgcagtgcgccgtgggctgcgcggtcttcgcgcggaatcgtcagacgaactcagtgtacggccgccacgcgctgcccagccacaggctccgagtgccggcgcgggccgcctgggtggtgcaggagctgccctcgctggccctgccgctctaccagtacgccagcgagtccgccccgcgtctccgcagcgcgcccaactgcatcctcctggccatgttcctcgtccactacgggcatcggtgcttaatttacccgtttctgatgcgaggaggaaagcctatgccactgttggcatgtacaatggcgattatgttctgtacctgtaacggctatttgcaaagcagatacttgagccattgtgcagtgtatgctgatgactgggtaacagatccccgttttctaataggttttggcttgtggttaacaggcatgttgataaacatccattcagatcatatcctaaggaatctcagaaaaccaggagatactggatacaaaataccaaggggaggcttatttgaatacgtaactgcagccaactattttggagaaatcatggagtggtgtggctatgccctggccagctggtctgtccaaggcgcggcttttgctttcttcacgttttgttttttatctggtagagcaaaagagcatcatgagtggtacctccggaaatttgaagagtatccaaagttcagaaaaattataattccatttttgttttaagtgcgtttttcatgaaattatcttcaacttgaagctttccaatggcgcttctctatggactttgtaaataagttatatctttgtaattttcctgctactttatcattttcaagatgtcctctaggaattttttttctagtaattttgcaatctacctaataagtacctaaatacgctgaaatggaggttgaatatcctactgtgtaacaggtcagaatttcaagctctgggtaataactgctgatattttttctaatttcaaatttacctcttttggctatgtcttgccaagtgtgtatgagactagactttacaactgtctttgatggcattttcagaacaataaatgtcacaatcccttctatagccccctacagtgatctcttcaaggtcaactgcagtgttgcttccctccccctatagggctggaatctgtctaggagccctctctcggaggccatagaggctgggggtagccattgtgcagtcatggcccgggggaaacttgccaaccttcgtgtcaggtgctgtgtataagtggagaacttggggatagaggaggaagctcctcgtggcccttccaaggtgaggcaaaggcatctggacttgttccagcccagcccaccgggtgacatcaccgggcagggaggggtgctggtggtggttcatacggagtaagctgctctgcctgtgtgagtggctcctgggccctaaacaggcacctttaggccatgggtcactcaccgtgagccatcaatgtgctctggtctgacatggtttctctctgtcttctagtctagacctagtttttttgttctgttccccacgtatggatatagtagagattgttgtctgtgaaatttctcttttgtagattttgagttttcccttgtagtgtaaagaatgatcactttctgtaacaataacaagaccactttttaagatttatcctgtttgttctttgttgattgaaacataataattgttaaaattctctacagccttctttttcttccatagctaatcttccttctaatagtttttgctttctgttttgctgttgttgctttgcaaagctttcccctcatagcctgtacctgttatcaatataaaataatcttcctgttgaatgcttcatgacttgaattctactttgataaaaacattgccatactgctttttatcttgatgaattcatctggcattgctttgccttatcatctcatctggagtttttaaatgccatttgtttcagttgtctttaacaacataataaatagactttgccatttaaaaaaaaaaaaaaaaaaaaaaa

SEQ ID NO: 129 - protein, 259 aa, Homo sapiens
MATATGVAEERLLAALAYLQCAVGCAVFARNRQTNSVYGRHALPSHRLRVPARAAWVVQELPSLALPLYQYASESAPRLRSAPNCILLAMFLVHYGHRCLIYPFLMRGGKPMPLLACTMAIMFCTCNGYLQSRYLSHCAVYADDWVTDPRFLIGFGLWLTGMLINIHSDHILRNLRKPGDTGYKIPRGGLFEYVTAANYFGEIMEWCGYALASWSVQGAAFAFFTFCFLSGRAKEHHEWYLRKFEEYPKFRKIIIPFLF

SEQ ID NO: 130 - DNA, 4740 bp, Homo sapiens
tggcttccttgtggttcctcagtggtgcctgcaacccctggttcacctccttccaggttctggctccttccagccatggctctcagagtccttctgttaacagccttgaccttatgtcatgggttcaacttggacactgaaaacgcaatgaccttccaagagaacgcaaggggcttcgggcagagcgtggtccagcttcagggatccagggtggtggttggagccccccaggagatagtggctgccaaccaaaggggcagcctctaccagtgcgactacagcacaggctcatgcgagcccatccgcctgcaggtccccgtggaggccgtgaacatgtccctgggcctgtccctggcagccaccaccagcccccctcagctgctggcctgtggtcccaccgtgcaccagacttgcagtgagaacacgtatgtgaaagggctctgcttcctgtttggatccaacctacggcagcagccccagaagttcccagaggccctccgagggtgtcctcaagaggatagtgacattgccttcttgattgatggctctggtagcatcatcccacatgactttcggcggatgaaggagtttgtctcaactgtgatggagcaattaaaaaagtccaaaaccttgttctctttgatgcagtactctgaagaattccggattcactttaccttcaaagagttccagaacaaccctaacccaagatcactggtgaagccaataacgcagctgcttgggcggacacacacggccacgggcatccgcaaagtggtacgagagctgtttaacatcaccaacggagcccgaaagaatgcctttaagatcctagttgtcatcacggatggagaaaagtttggcgatcccttgggatatgaggatgtcatccctgaggcagacagagagggagtcattcgctacgtcattggggtgggagatgccttccgcagtgagaaatcccgccaagagcttaataccatcgcatccaagccgcctcgtgatcacgtgttccaggtgaataactttgaggctctgaagaccattcagaaccagcttcgggagaagatctttgcgatcgagggtactcagacaggaagtagcagctcctttgagcatgagatgtctcaggaaggcttcagcgctgccatcacctctaatggccccttgctgagcactgtggggagctatgactgggctggtggagtctttctatatacatcaaaggagaaaagcaccttcatcaacatgaccagagtggattcagacatgaatgatgcttacttgggttatgctgccgccatcatcttacggaaccgggtgcaaagcctggttctgggggcacctcgatatcagcacatcggcctggtagcgatgttcaggcagaacactggcatgtgggagtccaacgctaatgtcaagggcacccagatcggcgcctacttcggggcctccctctgctccgtggacgtggacagcaacggcagcaccgacctggtcctcatcggggccccccattactacgagcagacccgagggggccaggtgtccgtgtgccccttgcccagggggagggctcggtggcagtgtgatgctgttctctacggggagcagggccaaccctggggccgctttggggcagccctaacagtgctgggggacgtaaatggggacaagctgacggacgtggccattggggccccaggagaggaggacaaccggggtgctgtttacctgtttcacggaacctcaggatctggcatcagcccctcccatagccagcggatagcaggctccaagctctctcccaggctccagtattttggtcagtcactgagtgggggccaggacctcacaatggatggactggtagacctgactgtaggagcccaggggcacgtgctgctgctcaggtcccagccagtactgagagtcaaggcaatcatggagttcaatcccagggaagtggcaaggaatgtatttgagtgtaatgatcaggtggtgaaaggcaaggaagccggagaggtcagagtctgcctccatgtccagaagagcacacgggatcggctaagagaaggacagatccagagtgttgtgacttatgacctggctctggactccggccgcccacattcccgcgccgtcttcaatgagacaaagaacagcacacgcagacagacacaggtcttggggctgacccagacttgtgagaccctgaaactacagttgccgaattgcatcgaggacccagtgagccccattgtgctgcgcctgaacttctctctggtgggaacgccattgtctgctttcgggaacctccggccagtgctggcggaggatgctcagagactcttcacagccttgtttccctttgagaagaattgtggcaatgacaacatctgccaggatgacctcagcatcaccttcagtttcatgagcctggactgcctcgtggtgggtgggccccgggagttcaacgtgacagtgactgtgagaaatgatggtgaggactcctacaggacacaggtcaccttcttcttcccgcttgacctgtcctaccggaaggtgtccacactccagaaccagcgctcacagcgatcctggcgcctggcctgtgagtctgcctcctccaccgaagtgtctggggccttgaagagcaccagctgcagcataaaccaccccatcttcccggaaaactcagaggtcacctttaatatcacgtttgatgtagactctaaggcttcccttggaaacaaactgctcctcaaggccaatgtgaccagtgagaacaacatgcccagaaccaacaaaaccgaattccaactggagctgccggtgaaatatgctgtctacatggtggtcaccagccatggggtctccactaaatatctcaacttcacggcctcagagaataccagtcgggtcatgcagcatcaatatcaggtcagcaacctggggcagaggagcccccccatcagcctggtgttcttggtgcccgtccggctgaaccagactgtcatatgggaccgcccccaggtcaccttctccgagaacctctcgagtacgtgccacaccaaggagcgcttgccctctcactccgactttctggctgagcttcggaaggcccccgtggtgaactgctccatcgctgtctgccagagaatccagtgtgacatcccgttctttggcatccaggaagaattcaatgctaccctcaaaggcaacctctcgtttgactggtacatcaagacctcgcataaccacctcctgatcgtgagcacagctgagatcttgtttaacgattccgtgttcaccctgctgccgggacagggggcgtttgtgaggtcccagacggagaccaaagtggagccgttcgaggtccccaaccccctgccgctcatcgtgggcagctctgtcgggggactgctgctcctggccctcatcaccgccgcgctgtacaagctcggcttcttcaagcggcaatacaaggacatgatgagtgaagggggtcccccgggggccgaaccccagtagcggctccttcccgacagagctgcctctcggtggccagcaggactctgcccagaccacacgagcccccaggctgctggacacgtcggacagcgaagtatccccgacaggacgggcttgggcttccatttgtgtgtgtgcaagtgtgtatgtgcgtgtgtgcgagtgtgtgcaagtgtctgtgtgcaagtgtgtgcacgtgtgcgtgtgcgtgcatgtgcactcgcacgcccatgtgtgagtgtgtgcaagtatgtgagtgtgtccagtgtgtgtgcgtgtgtccatgtgtgtgcagtgtgtgcatgtgtgcgagtgtgtgcatgtgtgtgctcaggggctgtggctcacgtgtgtgactcagagtgtctctggcgtgtgggtaggtgacggcagcgtagcctctccggcagaagggaactgcctgggctcccttgtgcgtgggtaagccgctgctgggttttcctccgggagaggggacggtcaatcctgtgggtgaagagagagggaaacacagcagcatctctccactgaaagaagtgggacttcccgtcgcctgcgagcctgcggcctgctggagcctgcgcagcttggatggatactccatgagaaaagccgtgggtggaaccaggagcctcctccacaccagcgctgatgcccaataaagatgcccactgaggaatcatgaagcttcctttctggattcatttattatttcaatgtgactttaattttttggatggataagcctgtctatggtacaaaaatcacaaggcattcaagtgtacagtgaaaagtctccctttccagatattcaagtcacctccttaaaggtagtcaagattgtgttttgaggtttccttcagacagattccaggcgatgtgcaagtgtatgcacgtgtgcacacaccacacacatacacacacacaagcttttttacacaaatggtagcatactttatattggtctgtatcttgctttttttcaccaatatttctcagacatcggttcatattaagacataaattactttttcattcttttataccgctgcatagtattccattgtgtgagtgtaccataatgtatttaaccagtcttcttttgatatactattttcatctcttgttattgcatctgctgagttaataaatcaaatatatgtcaaaaaaaaaaaaaaaaaaaaaaaaaaaaaaaaaaaaaaaaat

SEQ ID NO: 131 - protein, 1152 aa, Homo sapiens
MALRVLLLTALTLCHGFNLDTENAMTFQENARGFGQSVVQLQGSRVVVGAPQEIVAANQRGSLYQCDYSTGSCEPIRLQVPVEAVNMSLGLSLAATTSPPQLLACGPTVHQTCSENTYVKGLCFLFGSNLRQQPQKFPEALRGCPQEDSDIAFLIDGSGSIIPHDFRRMKEFVSTVMEQLKKSKTLFSLMQYSEEFRIHFTFKEFQNNPNPRSLVKPITQLLGRTHTATGIRKVVRELFNITNGARKNAFKILVVITDGEKFGDPLGYEDVIPEADREGVIRYVIGVGDAFRSEKSRQELNTIASKPPRDHVFQVNNFEALKTIQNQLREKIFAIEGTQTGSSSSFEHEMSQEGFSAAITSNGPLLSTVGSYDWAGGVFLYTSKEKSTFINMTRVDSDMNDAYLGYAAAIILRNRVQSLVLGAPRYQHIGLVAMFRQNTGMWESNANVKGTQIGAYFGASLCSVDVDSNGSTDLVLIGAPHYYEQTRGGQVSVCPLPRGRARWQCDAVLYGEQGQPWGRFGAALTVLGDVNGDKLTDVAIGAPGEEDNRGAVYLFHGTSGSGISPSHSQRIAGSKLSPRLQYFGQSLSGGQDLTMDGLVDLTVGAQGHVLLLRSQPVLRVKAIMEFNPREVARNVFECNDQVVKGKEAGEVRVCLHVQKSTRDRLREGQIQSVVTYDLALDSGRPHSRAVFNETKNSTRRQTQVLGLTQTCETLKLQLPNCIEDPVSPIVLRLNFSLVGTPLSAFGNLRPVLAEDAQRLFTALFPFEKNCGNDNICQDDLSITFSFMSLDCLVVGGPREFNVTVTVRNDGEDSYRTQVTFFFPLDLSYRKVSTLQNQRSQRSWRLACESASSTEVSGALKSTSCSINHPIFPENSEVTFNITFDVDSKASLGNKLLLKANVTSENNMPRTNKTEFQLELPVKYAVYMVVTSHGVSTKYLNFTASENTSRVMQHQYQVSNLGQRSPPISLVFLVPVRLNQTVIWDRPQVTFSENLSSTCHTKERLPSHSDFLAELRKAPVVNCSIAVCQRIQCDIPFFGIQEEFNATLKGNLSFDWYIKTSHNHLLIVSTAEILFNDSVFTLLPGQGAFVRSQTETKVEPFEVPNPLPLIVGSSVGGLLLLALITAALYKLGFFKRQYKDMMSEGGPPGAEPQ

SEQ ID NO: 132 - DNA, 538 bp, Homo sapiens
gctacactagagcagagtacgagtctgaggcggagggagtaatggcaggacaagcgtttagaaagtttcttccactctttgaccgagtattggttgaaaggagtgctgctgaaactgtaaccaaaggaggcattatgcttccagaaaaatctcaaggaaaagtattgcaagcaacagtagtcgctgttggatcgggttctaaaggaaagggtggagagattcaaccagttagcgtgaaagttggagataaagttcttctcccagaatatggaggcaccaaagtagttctagatgacaaggattatttcctatttagagatggtgacattcttggaaagtacgtagactgaaataagtcactattgaaatggcatcaacatgatgctgcccattccactgaagttctgaaatctttcgtcatgtaaataatttccatatttctcttttataataaactaatgataactaatgacatccagtgtctccaaaattgtttccttgtactgatataaacacttccaaataaaaatatgtaaat

SEQ ID NO: 133 - protein, 102 aa, Homo sapiens
MAGQAFRKFLPLFDRVLVERSAAETVTKGGIMLPEKSQGKVLQATVVAVGSGSKGKGGEIQPVSVKVGDKVLLPEYGGTKVVLDDKDYFLFRDGDILGKYVD

SEQ ID NO: 134 - DNA, 1105 bp, Homo sapiens
gcgccgcgactcgtgcgggtaggcgtctgcgctcggtttgagggctcggcgcggggtttcctgttccttcttctgcgcggctgcagctcgggacttcggcctgacccagcccccatggcttcagaagagctacagaaagatctagaagaggtaaaggtgttgctggaaaaggctactaggaaaagagtacgtgatgcccttacagctgaaaaatccaagattgagacagaaatcaagaacaagatgcaacagaaatcacagaagaaagcagaacttcttgataatgaaaaaccagctgctgtggttgctcccattacaacgggctatacggtgaaaatcagtaattatggatgggatcagtcagataagtttgtgaaaatctacattaccttaactggagttcatcaagttcccactgagaatgtgcaggtgcatttcacagagaggtcatttgatcttttggtaaagaatctaaatgggaagagttactccatgattgtgaacaatctcttgaaacccatctctgtggaaggcagttcaaaaaaagtcaagactgatacagttcttatattgtgtagaaagaaagtggaaaacacaaggtgggattacctgacccaggttgaaaaggagtgcaaagaaaaagagaagccctcctatgacactgaaacagatcctagtgagggattgatgaatgttctaaagaaaatttatgaagatggagacgatgatatgaagcgaaccattaataaagcctgggtggaatcaagagagaagcaagccaaaggagacacggaattttgagactttaaagtcgttttgggaactgtgatgtgatgtggaaatactgatgtttccagtaagggaatattggtgagctgcatatataaatttgacagatagctatttacatagccttctaagtaaaggcaatgaattctccatttcctactggaggatttatttaaataaaatatgcttattaaacactcctgcaaagatggttttattagtaccctggtcattttgttcaaggaagggttatattgcattctcacgtgaaatataaaaagcaagtcttgcccaataaaaacgctacattgtgtgt

SEQ ID NO: 135 - protein, 228 aa, Homo sapiens
MASEELQKDLEEVKVLLEKATRKRVRDALTAEKSKIETEIKNKMQQKSQKKAELLDNEKPAAVVAPITTGYTVKISNYGWDQSDKFVKIYITLTGVHQVPTENVQVHFTERSFDLLVKNLNGKSYSMIVNNLLKPISVEGSSKKVKTDTVLILCRKKVENTRWDYLTQVEKECKEKEKPSYDTETDPSEGLMNVLKKIYEDGDDDMKRTINKAWVESREKQAKGDTEF

SEQ ID NO: 136 - DNA, 353 bp, Homo sapiens
cacgagggctcctgctactctggctccgaggtgccagatgtgacatccagatgacccagtctccatcctccctgtctgcatctgtgggagacagagtcaccatcacttgccgggcaagtcagagcattagcagttctttaaattggtatcagcagaaaccagggaaagcccctaggctcctgatctatgctgcatccagtttgcaaagtggggtcccatcaaggttcagtggcagtggatctgggacagatttcactctcaccatcagcagtctgcaacctgaagattttgcaacttactactgtcaacagagttacagttcgccgatcaccttcggccaagggacacgactg

SEQ ID NO: 137 - protein, 108 aa, Homo sapiens
DIQMTQSPSSLSASVGDRVTITCRASQSISSYLNWYQQKPGKAPNLLIYAASSLQSGVPSRFSGSGSGTDFTLTISSLQPEDFATYYCQQSYSTSWTFGEGTKVEIKR

SEQ ID NO: 138 - DNA, 1663 bp, Homo sapiens
gtttgcacctcgctgctccagcctctggggcgcattccaaccttccagcctgcgacctgcggagaaaaaaaattacttattttcttgccccatacataccttgaggcgagcaaaaaaattaaattttaaccatgagggaaatcgtgcacatccaggctggtcagtgtggcaaccagatcggtgccaagttctgggaggtgatcagtgatgaacatggcatcgaccccaccggcacctaccacggggacagcgacctgcagctggaccgcatctctgtgtactacaatgaagccacaggtggcaaatatgttcctcgtgccatcctggtggatctagaacctgggaccatggactctgttcgctcaggtccttttggccagatctttagaccagacaactttgtatttggtcagtctggggcaggtaacaactgggccaaaggccactacacagagggcgccgagctggttgattctgtcctggatgtggtacggaaggaggcagagagctgtgactgcctgcagggcttccagctgacccactcactgggcgggggcacaggctctggaatgggcactctccttatcagcaagatccgagaagaataccctgatcgcatcatgaataccttcagtgtggtgccttcacccaaagtgtctgacaccgtggtcgagccctacaatgccaccctctccgtccatcagttggtagagaatactgatgagacctattgcattgacaacgaggccctctatgatatctgcttccgcactctgaagctgaccacaccaacctacggggatctgaaccaccttgtctcagccaccatgagtggtgtcaccacctgcctccgtttccctggccagctcaatgctgacctccgcaagttggcagtcaacatggtccccttcccacgtctccatttctttatgcctggctttgcccctctcaccagccgtggaagccagcagtatcgagctctcacagtgccggaactcacccagcaggtcttcgatgccaagaacatgatggctgcctgtgacccccgccacggccgatacctcaccgtggctgctgtcttccgtggtcggatgtccatgaaggaggtcgatgagcagatgcttaacgtgcagaacaagaacagcagctactttgtggaatggatccccaacaatgtcaagacagccgtctgtgacatcccacctcgtggcctcaagatggcagtcaccttcattggcaatagcacagccatccaggagctcttcaagcgcatctcggagcagttcactgccatgttccgccggaaggccttcctccactggtacacaggcgagggcatggacgagatggagttcaccgaggctgagagcaacatgaacgacctcgtctctgagtatcagcagtaccaggatgccaccgcagaagaggaggaggatttcggtgaggaggccgaagaggaggcctaaggcagagcccccatcacctcaggcttctcagttcccttagccgtcttactcaactgcccctttcctctccctcagaatttgtgtttgctgcctctatcttgttttttgttttttcttctggggggggtctagaacagtgcctggcacatagtaggcgctcaataaatacttgtttgttgaaaaaaaaaaaaaaaaaa

SEQ ID NO: 139 - protein, 444 aa, Homo sapiens
MREIVHIQAGQCGNQIGAKFWEVISDEHGIDPTGTYHGDSDLQLDRISVYYNEATGGKYVPRAILVDLEPGTMDSVRSGPFGQIFRPDNFVFGQSGAGNNWAKGHYTEGAELVDSVLDVVRKEAESCDCLQGFQLTHSLGGGTGSGMGTLLISKIREEYPDRIMNTFSVVPSPKVSDTVVEPYNATLSVHQLVENTDETYCIDNEALYDICFRTLKLTTPTYGDLNHLVSATMSGVTTCLRFPGQLNADLRKLAVNMVPFPRLHFFMPGFAPLTSRGSQQYRALTVPELTQQVFDAKNMMAACDPRHGRYLTVAAVFRGRMSMKEVDEQMLNVQNKNSSYFVEWIPNNVKTAVCDIPPRGLKMAVTFIGNSTAIQELFKRISEQFTAMFRRKAFLHWYTGEGMDEMEFTEAESNMNDLVSEYQQYQDATAEEEEDFGEEAEEEA

SEQ ID NO: 140 - DNA, 1661 bp, Homo sapiens
tgctgcagccgctgccgccgattccggatctcattgccacgcgcccccgacgaccgcccgacgtgcattcccgattccttttggttccaagtccaatatggcaactctaaaggatcagctgatttataatcttctaaaggaagaacagaccccccagaataagattacagttgttggggttggtgctgttggcatggcctgtgccatcagtatcttaatgaaggacttggcagatgaacttgctcttgttgatgtcatcgaagacaaattgaagggagagatgatggatctccaacatggcagccttttccttagaacaccaaagattgtctctggcaaagactataatgtaactgcaaactccaagctggtcattatcacggctggggcacgtcagcaagagggagaaagccgtcttaatttggtccagcgtaacgtgaacatatttaaattcatcattcctaatgttgtaaaatacagcccgaactgcaagttgcttattgtttcaaatccagtggatatcttgacctacgtggcttggaagataagtggttttcccaaaaaccgtgttattggaagtggttgcaatctggattcagcccgattccgttacctgatgggggaaaggctgggagttcacccattaagctgtcatgggtgggtccttggggaacatggagattccagtgtgcctgtatggagtggaatgaatgttgctggtgtctctctgaagactctgcacccagatttagggactgataaagataaggaacagtggaaagaggttcacaagcaggtggttgagagtgcttatgaggtgatcaaactcaaaggctacacatcctgggctattggactctctgtagcagatttggcagagagtataatgaagaatcttaggcgggtgcacccagtttccaccatgattaagggtctttacggaataaaggatgatgtcttccttagtgttccttgcattttgggacagaatggaatctcagaccttgtgaaggtgactctgacttctgaggaagaggcccgtttgaagaagagtgcagatacactttgggggatccaaaaggagctgcaattttaaagtcttctgatgtcatatcatttcactgtctaggctacaacaggattctaggtggaggttgtgcatgttgtcctttttatctgatctgtgattaaagcagtaatattttaagatggactgggaaaaacatcaactcctgaagttagaaataagaatggtttgtaaaatccacagctatatcctgatgctggatggtattaatcttgtgtagtcttcaactggttagtgtgaaatagttctgccacctctgacgcaccactgccaatgctgtacgtactgcatttgccccttgagccaggtggatgtttaccgtgtgttatataacttcctggctccttcactgaacatgcctagtccaacattttttcccagtgagtcacatcctgggatccagtgtataaatccaatatcatgtcttgtgcataattcttccaaaggatcttattttgtgaactatatcagtagtgtacattaccatataatgtaaaaagatctacatacaaacaatgcaaccaactatccaagtgttataccaactaaaacccccaataaaccttgaacagtg

SEQ ID NO: 141 - protein, 332 aa, Homo sapiens
MATLKDQLIYNLLKEEQTPQNKITVVGVGAVGMACAISILMKDLADELALVDVIEDKLKGEMMDLQHGSLFLRTPKIVSGKDYNVTANSKLVIITAGARQQEGESRLNLVQRNVNIFKFIIPNVVKYSPNCKLLIVSNPVDILTYVAWKISGFPKNRVIGSGCNLDSARFRYLMGERLGVHPLSCHGWVLGEHGDSSVPVWSGMNVAGVSLKTLHPDLGTDKDKEQWKEVHKQVVESAYEVIKLKGYTSWAIGLSVADLAESIMKNLRRVHPVSTMIKGLYGIKDDVFLSVPCILGQNGISDLVKVTLTSEEEARLKKSADTLWGIQKELQF

SEQ ID NO: 142 - DNA, 764 bp, Homo sapiens
  misc_feature (464)..(464): n is a, c, g, or t
aaagatttgtctacagttagacagggaagccaaggtcataactacagccagaactgtagaggctagacacctatgaggtataatgtattctattcaaactttgtgtgaaatggtatatttaactcacctgtcttgttggcatcacctctccttaaccctaacttcttgcaaaccctttaaagcatggacttgggaaatgtcagtgaccacctgccttctctgaccaggttaaaaaggctagccaatgcttgtgtaaaaaaaagaacaccacatattgttgtattatatgcaattggaaatgttcagttatcgcactttggtatccttttcagaaaaaaaaaaatctcaaaacttataaacataagcatggcattttacattgtaccaactgagtaacagtaaatagatgaggtgtgaccactataacttcttgaccaactttctatcttgaaactacacacatncaaccctaccagctaccattctaattctacaggatattttccagtgagacaagctgtacaatgaccactcttttcaaaacattccagaccatttccattttcttgatcataatatcgggcttttttctcttctgttttttaactttatccccttctggacagatgaaaccagtccctctactgacagattcacaacactggttgctcctagatattcttgcaagggatcaaaattctggttattggcatgagctcctcttttgtaggatgttatcccatgaagcatgatatttaaattgg

SEQ ID NO: 143 - protein, 517 aa, Homo sapiens
MELEELGIREECGVFGCIASGEWPTQLDVPHVITLGLVGLQHRGQESAGIVTSDGSSVPTFKSHKGMGLVNHVFTEDNLKKLYVSNLGIGHTRYATTGKCELENCQPFVVETLHGKIAVAHNGELVNAARLRKKLLRHGIGLSTSSDSEMITQLLAYTPPQEQDDTPDWVARIKNLMKEAPTAYSLLIMHRDVIYAVRDPYGNRPLCIGRLIPVSDINDKEKKTSETEGWVVSSESCSFLSIGARYYREVLPGEIVEISRHNVQTLDIISRSEGNPVAFCIFEYVYFARPDSMFEDQMVYTVRYRCGQQLAIEAPVDADLVSTVPESATPAALAYAGKCGLPYVEVLCKNRYVGRTFIQPNMRLRQLGVAKKFGVLSDNFKGKRIVLVDDSIVRGNTISPIIKLLKESGAKEVHIRVASPPIKYPCFMGINIPTKEELIANKPEFDHLAEYLGANSVVYLSVEGLVSSVQEGIKFKKQKEKKHDIMIQENGNGLECFEKSGHCTACLTGKYPVELEW

SEQ ID NO: 144 - DNA, 2142 bp, Homo sapiens
ggcgttggagctctttggggcccagctttgcggacccgggagctcgggacgcaggcggggcttgtgctccgcgggggcagggcgtagggtgggcctcctacctcccctgatctcgcggtttgttccgtttcattggagcttcccggaccgtgtgctcgacggtgccctaggtgccgtggggccacacgcgagtctgataagcaccctcccccggaatcatgcggtgctgtgaggcctagcgaagatgaagatagaatgcaaggtagaaagtgctggatacctttagaaagctgcaggactggtgcgatgggagttgagacgtaagaacctgcccgtccgtagggctctggatgctgctgaggcccgaggcccctatggcagatttgaaaattcacccttgtagagtcattcctgcctttgagcggactcccttttaagcagatctcaagagagcgttcggtggaggccctgggtctgcacagctcacctccctgggaactgctcgcccgagcgtcggagccggcgctggccccctgcagccggaaggttgcagccgcaggagccccggaggcccaggacacagggctcttgctcttgcagaatccacaggtctttcttgaggaaatctgtagacagaactttgtgctgcgtttttatctagggaaggaacagaagagtgtcgtctcctagaaatctagcactggagaaacgaggaaaattcttccagcgatggtctcccactcagagctgaggaagcttttctactcagcagatgctgtgtgttttgatgttgacagcacggtcatcagagaagaaggaatcgatgagctagccaaaatctgtggcgttgaggacgcggtgtcagaaatgacacggcgagccatgggcggggcagtgcctttcaaagctgctctcacagagcgcttagccctcatccagccctccagggagcaggtgcagagactcatagcagagcaacccccacacctgacccccggcataagggagctggtaagtcgcctacaggagcgaaatgttcaggttttcctaatatctggtggctttaggagtattgtagagcatgttgcttcaaagctcaatatcccagcaaccaatgtatttgccaataggctgaaattctactttaacggtgaatatgcaggttttgatgagacgcagccaacagctgaatctggtggaaaaggaaaagtgattaaacttttaaaggaaaaatttcattttaagaaaataatcatgattggagatggtgccacagatatggaagcctgtcctcctgctgatgctttcattggatttggaggaaatgtgatcaggcaacaagtcaaggataacgccaaatggtatatcactgattttgtagagctgctgggagaactggaagaataacatccattgtcgtacagctccaaacaacttcagatgaatttttacaagttatacagattgatactgtttgcttacagttgcctattacaacttgctatagaaagttggtacaaatgatctgtactttaaactacagttaggaatcctagaagattgctttttttttttttttaactgtagttccagtattatatgatgactattgatttcctggagaggttttttttttttttgagacagaatcttgctctgttgcccaggctggagtgcagtggcgcggtctcggctcactgcaagctctgcctcccaggttcacgccattctcctgcctcagcctcccgagtagctgggactacaggcacccgccaccacatccggctaattttttgtatttttagtagagacggggtttgaccgtgttagccaggatggtcttgatctcctgaccttgtgatccgcctgcctcagcctcccaaagtgctgggattacaggcttgggccaccgcgcccagccaatgtcctagagagttttgtgatctgaattctttatgtatatttgtagctatatttcatacaaagtgctttaagtgtggagagtcaattaaacacctttactcttagaaatacggattcggcagccttcagtgaatattggtttctctttggtatgtcaataaaagtttatccgtatgtcagaacggatttgtggaaaaaaaaaaaaaaaaaaaaaaaaaa

SEQ ID NO: 145 - protein, 225 aa, Homo sapiens
MVSHSELRKLFYSADAVCFDVDSTVIREEGIDELAKICGVEDAVSEMTRRAMGGAVPFKAALTERLALIQPSREQVQRLIAEQPPHLTPGIRELVSRLQERNVQVFLISGGFRSIVEHVASKLNIPATNVFANRLKFYFNGEYAGFDETQPTAESGGKGKVIKLLKEKFHFKKIIMIGDGATDMEACPPADAFIGFGGNVIRQQVKDNAKWYITDFVELLGELEE

SEQ ID NO: 146 - DNA, 1026 bp, Homo sapiens
gagagctggctgcgccgagccccctgcgcgctgcacatggggcgcctgacggaagcggcggcagcgggcagcggctctcgggctgcaggctgggcagggtcccctcccacgctcctgccgctgtctcccacgtcccccaggtgcgcggccaccatggcgtccagcgacgaggacggcaccaacggcggcgcctcggaggccggcgaggaccgggaggctcccggcaagcggaggcgcctggggttcttggccaccgcctggctcaccttctacgacatcgccatgaccgcggggtggttggttctagctattgccatggtacgtttttatatggaaaaaggaacacacagaggtttatataaaagtattcagaagacacttaaatttttccagacatttgccttgcttgagatagttcactgtttaattggaattgtacctacttctgtgattgtgactggggtccaagtgagttcaagaatctttatggtgtggctcattactcacagtataaaaccaatccagaatgaagagagtgtggtgctttttctggtcgcgtggactgtgacagagatcactcgctattccttctacacattcagccttcttgaccacttgccatacttcattaaatgggccagatataatttttttatcatcttatatcctgttggagttgctggtgaacttcttacaatatacgctgccttgccgcatgtgaagaaaacaggaatgttttcaataagacttcctaacaaatacaatgtctcttttgactactattattttcttcttataaccatggcatcatatatacctttgtttccacaactctattttcatatgttacgtcaaagaagaaaggtgcttcatggagaggtgattgtagaaaaggatgattaaatgatctctgcaaacaaggtgctttttccagaataaccaagattacctgagtccaagttttaataacaagaataaacaactttgtgaaatatcaaaaaaaaaaaaaaaaaaaaaaaaaaaaaa

SEQ ID NO: 147 - protein, 288 aa, Homo sapiens
MGRLTEAAAAGSGSRAAGWAGSPPTLLPLSPTSPRCAATMASSDEDGTNGGASEAGEDREAPGKRRRLGFLATAWLTFYDIAMTAGWLVLAIAMVRFYMEKGTHRGLYKSIQKTLKFFQTFALLEIVHCLIGIVPTSVIVTGVQVSSRIFMVWLITHSIKPIQNEESVVLFLVAWTVTEITRYSFYTFSLLDHLPYFIKWARYNFFIILYPVGVAGELLTIYAALPHVKKTGMFSIRLPNKYNVSFDYYYFLLITMASYIPLFPQLYFHMLRQRRKVLHGEVIVEKDD

SEQ ID NO: 148 - DNA, 1078 bp, Homo sapiens
gccatcaagcagctacgcaaactgcaggctcagatgaaggactttcaaagagagctggaagatgcccgtgcctccagagatgagatctttgccacagccaaagagaatgagaagaaagccaagagcttggaagcagacctcatgcagctacaagaggacctcgccgccgctgagagggctcgcaaacaagcggacctcgagaaggaggaactggcagaggagctggccagtagcctgtcgggaaggaacgcactccaggacgagaagcgccgcctggaggcccggatcgcccagctggaggaggagctggaggaggagcagggcaacatggaggccatgagcgaccgggtccgcaaagccacacagcaggccgagcagctcagcaacgagctggccacagagcgcacgacggcccagaagaatgagagtgcccggcagcagctcgagcggcagaacaaggagctccggagcaagctccacgagatggagggggccgtcaagtccaagttcaagtccaccatcgcggcgctggaggccaagattgcacagctggaggagcaggtcgagcaggaggccagagagaaacaggcggccaccaagtcgctgaagcagaaagacaagaagctgaaggaaatcttgctgcaggtggaggacgagcgcaagatggccgagcagtacaaggagcaggcagagaaaggcaatgcaggggtcaagcagctcaagaggcagctggaggaggcagaggaggagtcccagcgcatcaatgccaaccgcaggaagctgcagcgggagctggatgaggccacggagagcaacgaggccatgggccgcgaggtgaacgcactcaagagcaagctcagagggccccccccacaggaaacttcgcagtgatgcaccaggcgaggaaacgagacctctttcgttccttctagaaggtctggaggacgtagagttattgaaaatgcagatggttctgaggaggaaacggacactcgagacgcagacttcaatggaaccaaggccagtgaataagcaactttctacagttttgcaccacggcaagaaaaccaaaaacgca

SEQ ID NO: 149 - protein, 296 aa, Homo sapiens
AIKQLRKLQAQMKDFQRELEDARASRDEIFATAKENEKKAKSLEADLMQLQEDLAAAERARKQADLEKEELAEELASSLSGRNALQDEKRRLEARIAQLEEELEEEQGNMEAMSDRVRKATQQAEQLSNELATERTTAQKNESARQQLERQNKELRSKLHEMEGAVKSKFKSTIAALEAKIAQLEEQVEQEAREKQAATKSLKQKDKKLKEILLQVEDERKMAEQYKEQAEKGNAGVKQLKRQLEEAEEESQRINANRRKLQRELDEATESNEAMGREVNALKSKLRGPPPQETSQ

SEQ ID NO: 150 - DNA, 469 bp, Homo sapiens
  misc_feature (276)..(276): n is a, c, g, or t
  misc_feature (343)..(343): n is a, c, g, or t
  misc_feature (359)..(359): n is a, c, g, or t
  misc_feature (364)..(364): n is a, c, g, or t
  misc_feature (398)..(398): n is a, c, g, or t
  misc_feature (405)..(405): n is a, c, g, or t
  misc_feature (409)..(409): n is a, c, g, or t
ggatgtgggcaaaccttgttttaattgcaaacaacttaatttacagcacattcaataatgaaccaacaggagagttgctgactttgtaacatatgaatatataaaaatcccttgcaattcaggtagtcaaggtaaaaagcgcatacaaggaaggcaatcctcatttttctgaaaatgtttacattttaaaaggtgactagacatacttggaagttcaaagcagtaggatgtagcttgcagggaaaagaaaacccttttccatgttgttaggcagangtatatcaaatattatcccaattccacttgattaaaagtccagttggatggccctccttggaaccantcttggggcaggtccnctttnggtaaaaggcggggcccctggggtgggggttgtngaatccngggngtaggggggggccccagttccccttgcaggggccaaaccacatccttttccacccctttt

SEQ ID NO: 151 - protein, 317 aa, Homo sapiens
MTSRTRVTWPSPPRPLPVPAAAAVAFGAKGTDPAEARSSRGIEEAGPRAHGRAGREPERRRSRQQRRGGLQARRSTLLKTCARARATAPGAMKMVAPWTRFYSNSCCLCCHVRTGTILLGVWYLIINAVVLLILLSALADPDQYNFSSSELGGDFEFMDDANMCIAIAISLLMILICAMATYGAYKQRAAWIIPFFCYQIFDFALNMLVAITVLIYPNSIQEYIRQLPPNFPYRDDVMSVNPTCLVLIILLFISIILTFKGYLISCVWNCYRYINGRNSSDVLVYVTSNDTTVLLPPYDDATVNGAAKEPPPPYVSA

SEQ ID NO: 152 - DNA, 702 bp, Homo sapiens
  misc_feature (179)..(179): n is a, c, g, or t
  misc_feature (203)..(203): n is a, c, g, or t
  misc_feature (503)..(503): n is a, c, g, or t
  misc_feature (505)..(506): n is a, c, g, or t
  misc_feature (508)..(508): n is a, c, g, or t
  misc_feature (568)..(568): n is a, c, g, or t
  misc_feature (627)..(627): n is a, c, g, or t
  misc_feature (629)..(629): n is a, c, g, or t
  misc_feature (680)..(680): n is a, c, g, or t
  misc_feature (694)..(694): n is a, c, g, or t
  misc_feature (702)..(702): n is a, c, g, or t
ggaagatgactagttacggagggtgagggttgtttttttccaaaaagcctgggtagagtgatctgaattatctggcaccctcctgaatggaaccccagagtacctcctgtgtggaagggtccctggattttccctaacacccaccctctcccccttcagccatgctgatggcagagaanataagaacttggagcccatttctnactggagaggaaaacttgtcatctggctttgcggagaaggttccaccttacgctcgtagtacattatctttactatgtgctaggatatcatatttaaaaggacaaaaaaatgtaaaatacttgaatgagcttgtattataacattaatattattgagagtatctgctttccaggctgaagtgattcattcattattctagtcctgctttagtcctttgtaatttgtggtaattatgcttttctttttaatacaaaaaaatgtataaaaataaacacttgaaaagacaaaaaaaaaaaaanannanaaaactagttctagagcgggcggcaccgcggtggagcttcagcttttggtccctttagtnaggggtaattcgagcttggcgtaaacatgggcatagctgttcctgtgtttggtatccgntnacaatttcacacaacatactaacccgaagcataaagtgtaaagcctggggngcctgagggagctnacttactn

SEQ ID NO: 153 - protein, 1019 aa, Homo sapiens
MLWRVLLSKRPPFPHPELDFQEAPIPSCPGRLPGRKNSVALAAAPRKEPTGDREKPLPFPVLAPFSNPEHSAPAKVVRAAVPKQRKGSKVGDFGDAINWPTPGEIAHKSVQPQSHKPQPTRKLPPKKDMKEQEKGEGSDSKESPKTKSDESGEEKNGDEDCQRGGQKKKGNKHKWVPLQIDMKPEVPREKLASRPTRPPEPRHIPANRGEIKGSESATYVPVAPPTPAWQPEIKPEPAWHDQDETSSVKSDGAGGARASFRGRGRGRGRGRGRGRGGTRTHFDYQFGYRKFDGVEGPRTPKYMNNITYYFDNVSSTELYSVDQELLKDYIKRQIEYYFSVDNLERDFFLRRKMDADGFLPITLIASFHRVQALTTDISLIFAALKDSKVVEIVDEKVRRREEPEKWPLPPIVDYSQTDFSQLLNCPEFVPRQHYQKETESAPGSPRAVTPVPTKTEEVSNLKTLPKGLSASLPDLDSENWIEVKKRPRPSPARPKKSEESRFSHLTSLPQQLPSQQLMSKDQDEQEELDFLFDEEMEQMDGRKNTFTAWSDEESDYEIDDRDVNKILIVTQTPHYMRRHPGGDRTGNHTSRAKMSAELAKVINDGLFYYEQDLWAEKFEPEYSQIKQEVENFKKVNMISREQFDTLTPEPPVDPNQEVPPGPPRFQQVPTDALANKLFGAPEPSTIARSLPTTVPESPNYRNTRTPRTPRTPQLKDSSQTSRFYPVVKEGRTLDAKMPRKRKTRHSSNPPLESHVGWVMDSREHRPRTASISSSPSEGTPTVGSYGCTPQSLPKFQHPSHELLKENGFTQHVYHKYRRRCLNERKRLGIGQSQEMNTLFRFWSFFLRDHFNKKMYEEFKQLALEDAKEGYRYGLECLFRYYSYGLEKKFRLDIFKDFQEETVKDYEAGQLYGLEKFWAFLKYSKAKNLDIDPKLQEYLGKFRRLEDFRVDPPMGEEGNHKRHSVVAGGGGGEGRKRCPSQSSSRPAAMISQPPTPPTGQPVREDAKWTSQHSNTQTLGK

SEQ ID NO: 154 - DNA, 613 bp, Homo sapiens
  misc_feature (147)..(147): n is a, c, g, or t
  misc_feature (428)..(428): n is a, c, g, or t
  misc_feature (534)..(534): n is a, c, g, or t
  misc_feature (566)..(566): n is a, c, g, or t
  misc_feature (572)..(572): n is a, c, g, or t
gtttaaattcatttcctctccagcaaaagtgagcttaaataatttctccaaactaaagctctcatgtttttggaagggctgcctttgcaagtgaggtttctgagaaatgactgttgttcccaaaacaagagggagctgggctggaanaccactattcttctttaggcatcttgttacagagagaggcagggtcttcactgacatattaaatcctgttccctgaaccagcccctccctcttctgctccacttcctcacctgtgcagacgtcattttcaaggtgttagccttactgatttgcactgatctgtttgttccctgagctttttaaataccctgtgaaaattttctttcctcccttggtcatcatgcatctaattgtggggaaatgtttgtcaaaccaacctgcaaagcagcatggtgtagttnagaagaataaacagagaagactgggtgaagctattgtttgtttgcttctttggggcctgggtttcctcatctaatctgcaaaccaagaaatgcagactagtcctancactcccggaagactgacgttgtgccaggtanttatgnaaaggctcaatgtaaaccctcgacttcacgtaacctcagac

SEQ ID NO: 155 - protein, 239 aa, Homo sapiens
MAPSVPAAEPEYPKGIRAVLLGPPGAGKGTQAPRLAENFCVCHLATGDMLRAMVASGSELGKKLKATMDAGKLVSDEMVVELIEKNLETPLCKNGFLLDGFPRTVRQAEMLDDLMEKRKEKLDSVIEFSIPDSLLIRRITGRLIHPKSGRSYHEEFNPPKEPMKDDITGEPLIRRSDDNEKALKIRLQAYHTQTTPLIEYYRKRGIHSAIDASQTPDVVFASILAAFSKATCKDLVMFI

SEQ ID NO: 156 - DNA, 1642 bp, Homo sapiens
taaaaagcaaaagaattccggggtagttatgggaaagaacctagagagcaagaagaaaagaggaatggtgcccgaatctgggagagatagacttcaggatggccagtcattgaatgggggataggtgaagaacagagcctctcaatcagacgggtgtaaataagagacggaggggagtccaaaagaaaaggaagaggaggaaaaacaagtgtgtgttggggggaacagggggaaaagcatttttggtggatggtatgaagccagccatggaaactgcagccgaggaaaatactgaacaaagccaagagagaaaaggctgctttgaatgctgcatcaagtgtctgggaggagtcccctacgcctccctggtggccaccatcctctgcttctccggggtggccttattctgcggctgtgggcatgtggctctcgcaggcaccgtggcgattcttgagcaacacttctccaccaacgccagtgaccatgccttgctgagcgaggtgatacaactgatgcagtatgtcatctatggaattgcgtcctttttcttcttgtatgggatcattctgttggcagaaggcttttacaccacaagtgcagtgaaagaactgcacggtgagtttaaaacaaccgcttgtggccgatgcatcagtggaatgttcgttttcctcacctatgtgcttggagtggcctggctgggtgtgtttggtttctcagcggtgcccgtgtttatgttctacaacatatggtcaacttgtgaagtcatcaagtcaccgcagaccaacgggaccacgggtgtggagcagatctgtgtggatatccgacaatacggtatcattccttggaatgctttccccggaaaaatatgtggctctgccctggagaacatctgcaacacaaacgagttctacatgtcctatcacctgttcattgtggcctgtgcaggagctggtgccaccgtcattgccctgctgatctacatgatggctactacatataactatgcggttttgaagtttaagagtcgggaagattgctgcactaaattctaaattgcataaggagttttagagagctatgctctgtagcatgaaatatcactgacactccagactaaagcagagtctaggtttctgcaattttgttacagtaatttgtaaatagctttagtaaactcaccttgcatggtagattaataagatgacttactgtacatgaattacacaataatgagatctggtggctatttccacattttgaaaaggattcagttatttactgacagtggtgagcatcctttttaaaataatgttctgatacttaaacattagagagcagtatctttaaatgaattattaacactttggaatacttacattttctgttatttttgattgcctgataaccagtttcaatgatgaaaatgaaaacaagtgctgaagatgaaatggaagagaaccgttttaatctggattttgttttgtcacacctggaaaatactttgcaaatatgttctaaattgaaaacaatttttttatgatcacatggttcactaccaaatgaccctcaaataagccagatgaaaatttgaagaaaaaggtcacccagttctctggaaaaaaaaaaaaaaaaaaaaaaaaaa

SEQ ID NO: 157 - protein, 265 aa, Homo sapiens
MKPAMETAAEENTEQSQERKGCFECCIKCLGGVPYASLVATILCFSGVALFCGCGHVALAGTVAILEQHFSTNASDHALLSEVIQLMQYVIYGIASFFFLYGIILLAEGFYTTSAVKELHGEFKTTACGRCISGMFVFLTYVLGVAWLGVFGFSAVPVFMFYNIWSTCEVIKSPQTNGTTGVEQICVDIRQYGIIPWNAFPGKICGSALENICNTNEFYMSYHLFIVACAGAGATVIALLIYMMATTYNYAVLKFKSREDCCTKF

SEQ ID NO: 158 - DNA, 1750 bp, Homo sapiens
gcggactgcgcatgtgcaggacccagcaggtctagagcttttctgtgtttctccggacttcgagccatggcggtgacggaagcgagcctgttgcgccagtgccccctgcttctgccccagaaccggtcgaaaaccgtgtatgagggattcatctcggctcagggaagagacttccaccttaggatagtgttgcctgaagatttacaactgaagaatgcaagattattatgtagttggcagctgagaacaatacttagtggataccatcgaatagtacaacagagaatgcagcactctcctgatctaatgagctttatgatggagttgaagatgcttttggaagttgccttaaagaatagacaagagctgtatgcactacctcctcctccccagttctactcaagccttattgaagagataggaactcttggttgggataaacttgtgtatgcggatacctgcttcagtaccatcaagttaaaagcagaagatgcttctggtagagagcatttaatcactctcaagttgaaggcaaagtatcctgcagaatcaccagattattttgtggattttcctgttccattttgtgcctcctggacacctcagagctccttaataagcatttatagtcagtttttggcagcaatagaatcactaaaggcattctgggatgttatggatgaaatcgatgagaagacctgggtacttgagccagaaaaacctccacggagtgcaacagcacgcagaattgcattaggtaataatgtttccataaatatagaggtagaccccaggcatcctactatgcttcctgagtgcttctttcttggagctgaccatgtggtaaaacccctgggaattaagctgagcaggaacatacatttgtgggatccagaaaatagtgtgttacaaaatttgaaagatgttttagaaattgattttccagctcgtgctatcctggaaaaatctgattttactatggattgtggaatttgttatgcttatcaacttgacggtaccattcctgatcaagtgtgtgataattctcagtgtggacaacctttccatcaaatatgcttatatgagtggctgagaggactactaactagtagacagagttttaacatcatatttggtgaatgtccatattgtagtaagccaattaccttaaaaatgtctggaaggaaacactgaaataagaatacaacatttcggtgaagagctggaaacttaaaaaattatcaaaaggaattttggtatcatcttcagagaaaaaataaagcaagaaatactaacatcaaaaggacaggtatgatgatgcgataataataaacatctgcgtttgtctcttcactaagagtaaactgggaaattgtaggccaaagtccagttgaactttctaagtctgtgatccccgtgctgactgtggaagtgtatttataccaagatggagatcttgacttcttgaatatatctggactggtaaaatcttgatgaggctcataaaatgagtttgggaattgtgtatagctgattttttgtgggaaactgtttacttcattcaaaggttcttgagactcttgatatttctgtcttctccttgtgctttcctatggaaaaaatacatatatagtttagtttgttagacgtgagttatccaagtatttattttgtgtagtgtgtaagaatgctaaataaaatgttatacaagatcaaaaaaaaaaaaaaaaaaaaaaaaaaaaaaaaaaaa

SEQ ID NO: 159 - protein, 375 aa, Homo sapiens
MAVTEASLLRQCPLLLPQNRSKTVYEGFISAQGRDFHLRIVLPEDLQLKNARLLCSWQLRTILSGYHRIVQQRMQHSPDLMSFMMELKMLLEVALKNRQELYALPPPPQFYSSLIEEIGTLGWDKLVYADTCFSTIKLKAEDASGREHLITLKLKAKYPAESPDYFVDFPVPFCASWTPQSSLISIYSQFLAAIESLKAFWDVMDEIDEKTWVLEPEKPPRSATARRIALGNNVSINIEVDPRHPTMLPECFFLGADHVVKPLGIKLSRNIHLWDPENSVLQNLKDVLEIDFPARAILEKSDFTMDCGICYAYQLDGTIPDQVCDNSQCGQPFHQICLYEWLRGLLTSRQSFNIIFGECPYCSKPITLKMSGRKH

SEQ ID NO: 160 - DNA, 541 bp, Homo sapiens
  misc_feature (522)..(522): n is a, c, g, or t
tttttttttttaaaagaaatggatgcttttattcaacctgagttaaaaccacaatgaatcatatcagagttcatgggaatcataataaatgactagtaaaccactcacaaaatcaaagctatcaacatactaggatcacacacattaattagtgctatagttcaaaacataccctttaacttatttagcacgcaaaataatcataaaagtaatgtctataagctctaaccaaaaattttaaaaattaaaaatagcacaattctacaattctgattttaccaagaaaataaaccttttttggcacatattatcctatgaaaatggaaagctgagtcaggctgctctgcttttcacagcacaaataagcattcatgctatcagacttgggaaattaactcggtgacaaaaattcactggaaaatagaatccttggaaaaatggggtcaggtgccatccactgagaggcaatgataatgtgtgtccttcgttattagcacaaagttaggcagcacactataattntagctacatgcaactctat

SEQ ID NO: 161 - protein, 442 aa, Homo sapiens
MSDSAGGRAGLRRYPKLPVWVVEDHQEVLPFIYRAIGSKHLPASNVSFLHFDSHPDLLIPVNMPADTVFDKETLFGELSIENWIMPAVYAGHFSHVIWFHPTWAQQIREGRHHFLVGKDTSTTTIRVTSTDHYFLSDGLYVPEDQLENQKPLQLDVIMVKPYKLCNNQEENDAVSSAKKPKLALEDSENTASTNCDSSPEGLEKDTATQRSDQTCLEPSCSCSSENQECQTAASTGEILEILKKGKAFVLDIDLDFFSVKNPFKEMFTQEEYKILQELYQFKKPGTNLTEEDLVDIVDTRIHQLEDLEATFADLCDGDDEETVQRWASNPGMESLVPLVQSLKKRMEVPDYEMVHQAGLTCDYSELPHHISTEQEIECLIQSVHYLLKNLPNPTLVTIARSSLDDYCPSDQVDTIQEKVLNMLRALYGNLDLQVYAAESPPS

SEQ ID NO: 162 - DNA, 3432 bp, Homo sapiens
actccagcgcgcggctacctacgcttggtgcttgctttctccagccatcggagaccagagccgccccctctgctcgagaaaggggctcagcggcggcggaagcggagggggaccaccgtggagagcgcggtcccagcccggccactgcggatccctgaaaccaaaaagctcctgctgcttctgtaccccgcctgtccctcccagctgcgcagggccccttcgtgggatcatcagcccgaagacagggatggagaggcctctgtgctcccacctctgcagctgcctggctatgctggccctcctgtcccccctgagcctggcacagtatgacagctggccccattaccccgagtacttccagcaaccggctcctgagtatcaccagccccaggcccccgccaacgtggccaagattcagctgcgcctggctgggcagaagaggaagcacagcgagggccgggtggaggtgtactatgatggccagtggggcaccgtgtgcgatgacgacttctccatccacgctgcccacgtcgtctgccgggagctgggctatgtggaggccaagtcctggactgccagctcctcctacggcaagggagaagggcccatctggttagacaatctccactgtactggcaacgaggcgacccttgcagcatgcacctccaatggctggggcgtcactgactgcaagcacacggaggatgtcggtgtggtgtgcagcgacaaaaggattcctgggttcaaatttgacaattcgttgatcaaccagatagagaacctgaatatccaggtggaggacattcggattcgagccatcctctcaacctaccgcaagcgcaccccagtgatggagggctacgtggaggtgaaggagggcaagacctggaagcagatctgtgacaagcactggacggccaagaattcccgcgtggtctgcggcatgtttggcttccctggggagaggacatacaataccaaagtgtacaaaatgtttgcctcacggaggaagcagcgctactggccattctccatggactgcaccggcacagaggcccacatctccagctgcaagctgggcccccaggtgtcactggaccccatgaagaatgtcacctgcgagaatgggctgccggccgtggtgagttgtgtgcctgggcaggtcttcagccctgacggaccctcgagattccggaaagcatacaagccagagcaacccctggtgcgactgagaggcggtgcctacatcggggagggccgcgtggaggtgctcaaaaatggagaatgggggaccgtctgcgacgacaagtgggacctggtgtcggccagtgtggtctgcagagagctgggctttgggagtgccaaagaggcagtcactggctcccgactggggcaagggatcggacccatccacctcaacgagatccagtgcacaggcaatgagaagtccattatagactgcaagttcaatgccgagtctcagggctgcaaccacgaggaggatgctggtgtgagatgcaacacccctgccatgggcttgcagaagaagctgcgcctgaacggcggccgcaatccctacgagggccgagtggaggtgctggtggagagaaacgggtcccttgtgtgggggatggtgtgtggccaaaactggggcatcgtggaggccatggtggtctgccgccagctgggcctgggattcgccagcaacgccttccaggagacctggtattggcacggagatgtcaacagcaacaaagtggtcatgagtggagtgaagtgctcgggaacggagctgtccctggcgcactgccgccacgacggggaggacgtggcctgcccccagggcggagtgcagtacggggccggagttgcctgctcagaaaccgcccctgacctggtcctcaatgcggagatggtgcagcagaccacctacctggaggaccggcccatgttcatgctgcagtgtgccatggaggagaactgcctctcggcctcagccgcgcagaccgaccccaccacgggctaccgccggctcctgcgcttctcctcccagatccacaacaatggccagtccgacttccggcccaagaacggccgccacgcgtggatctggcacgactgtcacaggcactaccacagcatggaggtgttcacccactatgacctgctgaacctcaatggcaccaaggtggcagagggccacaaggccagcttctgcttggaggacacagaatgtgaaggagacatccagaagaattacgagtgtgccaacttcggcgatcagggcatcaccatgggctgctgggacatgtaccgccatgacatcgactgccagtgggttgacatcactgacgtgccccctggagactacctgttccaggttgttattaaccccaacttcgaggttgcagaatccgattactccaacaacatcatgaaatgcaggagccgctatgacggccaccgcatctggatgtacaactgccacataggtggttccttcagcgaagagacggaaaaaaagtttgagcacttcagcgggctcttaaacaaccagctgtccccgcagtaaagaagcctgcgtggtcaactcctgtcttcaggccacaccacatcttccatgggacttccccccaacaactgagtctgaacgaatgccacgtgccctcacccagcccggcccccaccctgtccagacccctacagctgtgtctaagctcaggaggaaagggaccctcccatcattcatggggggctgctacctgacccttggggcctgagaaggccttgggggggtggggtttgtccacagagctgctggagcagcaccaagagccagtcttgaccgggatgaggcccacagacaggttgtcatcagcttgtcccattcaagccaccgagctcaccacagacacagtggagccgcgctcttctccagtgacacgtggacaaatgcgggctcatcagcccccccagagagggtcaggccgaaccccatttctcctcctcttaggtcattttcagcaaacttgaatatctagacctctcttccaatgaaaccctccagtctattatagtcacatagataatggtgccacgtgttttctgatttggtgagctcagacttggtgcttccctctccacaacccccaccccttgtttttcaagatactattattatattttcacagacttttgaagcacaaatttattggcatttaatattggacatctgggcccttggaagtacaaatctaaggaaaaaccaacccactgtgtaagtgactcatcttcctgttgttccaattctgtgggtttttgattcaacggtgctataaccagggtcctgggtgacagggcgctcactgagcaccatgtgtcatcacagacacttacacatacttgaaacttggaataaaagaaagatttatg

SEQ ID NO: 163 - protein, 774 aa, Homo sapiens
MERPLCSHLCSCLAMLALLSPLSLAQYDSWPHYPEYFQQPAPEYHQPQAPANVAKIQLRLAGQKRKHSEGRVEVYYDGQWGTVCDDDFSIHAAHVVCRELGYVEAKSWTASSSYGKGEGPIWLDNLHCTGNEATLAACTSNGWGVTDCKHTEDVGVVCSDKRIPGFKFDNSLINQIENLNIQVEDIRIRAILSTYRKRTPVMEGYVEVKEGKTWKQICDKHWTAKNSRVVCGMFGFPGERTYNTKVYKMFASRRKQRYWPFSMDCTGTEAHISSCKLGPQVSLDPMKNVTCENGLPAVVSCVPGQVFSPDGPSRFRKAYKPEQPLVRLRGGAYIGEGRVEVLKNGEWGTVCDDKWDLVSASVVCRELGFGSAKEAVTGSRLGQGIGPIHLNEIQCTGNEKSIIDCKFNAESQGCNHEEDAGVRCNTPAMGLQKKLRLNGGRNPYEGRVEVLVERNGSLVWGMVCGQNWGIVEAMVVCRQLGLGFASNAFQETWYWHGDVNSNKVVMSGVKCSGTELSLAHCRHDGEDVACPQGGVQYGAGVACSETAPDLVLNAEMVQQTTYLEDRPMFMLQCAMEENCLSASAAQTDPTTGYRRLLRFSSQIHNNGQSDFRPKNGRHAWIWHDCHRHYHSMEVFTHYDLLNLNGTKVAEGHKASFCLEDTECEGDIQKNYECANFGDQGITMGCWDMYRHDIDCQWVDITDVPPGDYLFQVVINPNFEVAESDYSNNIMKCRSRYDGHRIWMYNCHIGGSFSEETEKKFEHFSGLLNNQLSPQ

SEQ ID NO: 164 - DNA, 822 bp, Homo sapiens
  misc_feature (282)..(282): n is a, c, g, or t
gagctcagcgctgggtctctcggtcccgcagccgtgaggaggacggtctgcatactcgctgcccgcggctccctcccccgcgtccctgcgaccgccgcgggaagatggcctcaggagtgcaagtagctgatgaagtatgtcgcattttttatgacatgaaagttcgtaaatgctccacaccagaagaaatcaagaaaagaaagaaggctgtcatttttgtctcagtgcagacaaaaagtgcatcattgtagaagaaggcaaagagatcttggttggagatgntggtgtaaccataactgatcctttcaagcatttgtgggaatgcttcctgaaaaagatggtcgctatgcttgtgtatgatgcaagcttggaaacaaaagaatccagaaacagaagagtcgatgttttttgtgggcaccagaactagcacctctgaaaagtacaatgatctatgcaagctccaaggatgcaattaaaaagaaatttcaggcataaaacatgaatgtcaagcaaatggaccagaagatctcaatcgggcttgtatggctgaaaagttaggtggatccttaatgtgtagccttgtgaaggatgcctgtgtagattattcaggccaccaaattggaagctccatgtttaatgtgatcctctgctatataataaagcaatattttaggcagggtctcactgagggggacctgtcttgtcatctttagagtaaactattctattaaatttggaaaggcctaataatctaagtctaaagtactggaggggacatacatcttttggccaaaaaaaaaaaaaaaaaaattgggggggggc

SEQ ID NO: 165 - protein, 165 aa, Homo sapiens
MASGVQVADEVCRIFYDMKVRKCSTPEEIKKRKKAVIFCLSADKKCIIVEEGKEILVGDVGVTITDPFKHFVGMLPEKDCRYALYDASFETKESRKEELMFFLWAPELAPLKSKMIYASSKDAIKKKFQGIKHECQANGPEDLNRACIAEKLGGSLIVAFEGCPV

SEQ ID NO: 166 - DNA, 1612 bp, Homo sapiens
ggacagctcctgcctcccgcagggcccacctgtgtcccccagcgccgctccacccagcaggcctgagcccctctctgctgccagacaccccctgctgcccactctcctgctgctcgggttctgaggcacagcttgtcacaccgaggcggattctctttctctttctctttctcttctggcccacagccgcagcaatggcgctgagttcctctgctggagttcatcctgctagctgggttcccgagctgccggtctgagcctgaggcatggagcctcctggagactgggggcctcctccctggagatccacccccagaaccgacgtcttgaggctggtgctgtatctcaccttcctgggagccccctgctacgccccagctctgccgtcctgcaaggaggacgagtacccagtgggctccgagtgctgccccaagtgcagtccaggttatcgtgtgaaggaggcctgcggggagctgacgggcacagtgtgtgaaccctgccctccaggcacctacattgcccacctcaatggcctaagcaagtgtctgcagtgccaaatgtgtgacccagccatgggcctgcgcgcgagccggaactgctccaggacagagaacgccgtgtgtggctgcagcccaggccacttctgcatcgtccaggacggggaccactgcgccgcgtgccgcgcttacgccacctccagcccgggccagagggtgcagaagggaggcaccgagagtcaggacaccctgtgtcagaactgccccccggggaccttctctcccaatgggaccctggaggaatgtcagcaccagaccaagtgcagctggctggtgacgaaggccggagctgggaccagcagctcccactgggtatggtggtttctctcagggagcctcgtcatcgtcattgtttgctccacagttggcctaatcatatgtgtgaaaagaagaaagccaaggggtgatgtagtcaaggtgatcgtctccgtccagcggaaaagacaggaggcagaaggtgaggccacagtcattgaggccctgcaggcccctccggacgtcaccacggtggccgtggaggagacaataccctcattcacggggaggagcccaaaccactgacccacagactctgcaccccgacgccagagatacctggagcgacggctgctgaaagaggctgtccacctggcgaaaccaccggagcccggaggcttgggggctccgccctgggctggcttccgtctcctccagtggagggagaggtggggcccctgctggggtagagctggggacgccacgtgccattcccatgggccagtgagggcctggggcctctgttctgctgtggcctgagctccccagagtcctgaggaggagcgccagttgcccctcgctcacagaccacacacccagccctcctgggccagcccagagggcccttcagaccccagctgtctgcgcgtctgactcttgtggcctcagcaggacaggccccgggcactgcctcacagccaaggctggactgggttggctgcagtgtggtgtttagtggataccacatcggaagtgattttctaaattggatttgaattcggaaaaaaaaaaaaaaaaaa

SEQ ID NO: 167 - protein, 283 aa, Homo sapiens
MEPPGDWGPPPWRSTPKTDVLRLVLYLTFLGAPCYAPALPSCKEDEYPVGSECCPKCSPGYRVKEACGELTGTVCEPCPPGTYIAHLNGLSKCLQCQMCDPAMGLRASRNCSRTENAVCGCSPGHFCIVQDGDHCAACRAYATSSPGQRVQKGGTESQDTLCQNCPPGTFSPNGTLEECQHQTKCSWLVTKAGAGTSSSHWVWWFLSGSLVIVIVCSTVGLIICVKRRKPRGDVVKVIVSVQRKRQEAEGEATVIEALQAPPDVTTVAVEETIPSFTGRSPNH

SEQ ID NO: 168 - DNA, 2101 bp, Homo sapiens
cgcgcgcggcgaatctcaacgctgcgccgtctgcgggcgcttccgggccaccagtttctctgctttccaccctggcgccccccagccctggctccccagctgcgctgccccgggcgtccacgccctgcgggcttagcgggttcagtgggctcaatctgcgcagcgccacctccatgttgaccaagcctctacaggggcctcccgcgccccccgggacccccacgccgccgccaggaggcaaggatcgggaagcgttcgaggccgagtatcgactcggccccctcctgggtaaggggggctttggcaccgtcttcgcaggacaccgcctcacagatcgactccaggtggccatcaaagtgattccccggaatcgtgtgctgggctggtcccccttgtcagactcagtcacatgcccactcgaagtcgcactgctatggaaagtgggtgcaggtggtgggcaccctggcgtgatccgcctgcttgactggtttgagacacaggagggcttcatgctggtcctcgagcggcctttgcccgcccaggatctctttgactatatcacagagaagggcccactgggtgaaggcccaagccgctgcttctttggccaagtagtggcagccatccagcactgccattcccgtggagttgtccatcgtgacatcaaggatgagaacatcctgatagacctacgccgtggctgtgccaaactcattgattttggttctggtgccctgcttcatgatgaaccctacactgactttgatgggacaagggtgtacagccccccagagtggatctctcgacaccagtaccatgcactcccggccactgtctggtcactgggcatcctcctctatgacatggtgtgtggggacattccctttgagagggaccaggagattctggaagctgagctccacttcccagcccatgtctccccagactgctgtgccctaatccgccggtgcctggcccccaaaccttcttcccgaccctcactggaagagatcctgctggacccctggatgcaaacaccagccgaggatgtacccctcaacccctccaaaggaggccctgcccctttggcctggtccttgctaccctaagcctggcctggcctggcctggcccccaatggtcagaagagccatcccatggccatgtcacagggatagatggacatttgttgacttggttttacaggtcattaccagtcattaaagtccagtattactaaggtaagggattgaggatcaggggttagaagacataaaccaagtctgcccagttcccttcccaatcctacaaaggagccttcctcccagaacctgtggtccctgattctggagggggaacttcttgcttctcattttgctaaggaagtttattttggtgaagttgttcccattctgagccccgggactcttattctgatgatgtgtcaccccacattggcacctcctactaccaccacacaaacttagttcatatgctcttacttgggcaagggtgctttccttccaataccccagtagcttttattttagtaaagggaccctttcccctagcctagggtcccatattgggtcaagctgcttacctgcctcagcccaggattctttattctgggggaggtaatgccctgttgttaccccaaggcttcttttttttttttttttgggtgaggggaccctactctgttatcccaagtgctcttattctggtgagaagaaccttacttccataatttgggaaggaatggaagatggacaccaccggacaccaccagacactaggatgggatggatggttttttgggggatgggctaggggaaataaggcttgctgtttgttctcctggggcgctccctccaacttttgcagattcttgcaacctcctcctgagccgggattgtccaattactaaaatgtaaataatcacgtattgtggggaggggagttccaagtgtgccctcctctcttctcctgcctggattatttaaaaagccatgtgtggaaacccactatttaataaaagtaatagaatcagaaaaaaaaaaaaaaaaaaaaaaaaaaaaaaaaaaaaaaaaaaaaaaaaa

SEQ ID NO: 169 - protein, 311 aa, Homo sapiens
MLTKPLQGPPAPPGTPTPPPGGKDREAFEAEYRLGPLLGKGGFGTVFAGHRLTDRLQVAIKVIPRNRVLGWSPLSDSVTCPLEVALLWKVGAGGGHPGVIRLLDWFETQEGFMLVLERPLPAQDLFDYITEKGPLGEGPSRCFFGQVVAAIQHCHSRGVVHRDIKDENILIDLRRGCAKLIDFGSGALLHDEPYTDFDGTRVYSPPEWISRHQYHALPATVWSLGILLYDMVCGDIPFERDQEILEAELHFPAHVSPDCCALIRRCLAPKPSSRPSLEEILLDPWMQTPAEDVPLNPSKGGPAPLAWSLLP

SEQ ID NO: 170 - DNA, 3028 bp, Homo sapiens
gaagaggttcggcggctgatggcggatcaggatcggaagcctgcgtaactttctcccttgatccgggagtctttccactggattcacaatgacatcctttcaagaagtcccattgcagacttccaactttgcccatgtcatctttcaaaatgtggccaagagttaccttcctaatgcacacctggaatgtcattacaccttaactccatatattcatccacatccaaaagattgggttggtatattcaaggttggatggagtactgctcgtgattattacacgtttttatggtcccctatgcctgaacattatgtggaaggatcaacagtcaattgtgtactagcattccaaggatattaccttccaaatgatgatggagaattttatcagttctgttacgttacccataagggtgaaattcgtggagcaagtacacctttccagtttcgagcttcttctccagttgaagagctgcttactatggaagatgaaggaaattctgacatgttagtggtgaccacaaaagcaggccttcttgagttgaaaattgagaaaaccatgaaagaaaaagaagaactgttaaagttaattgccgttctggaaaaagaaacagcacaacttcgagaacaagttgggagaatggaaagagaacttaaccatgagaaagaaagatgtgaccaactgcaagcagaacaaaagggtcttactgaagtaacacaaagcttaaaaatggaaaatgaagagtttaagaagaggttcagtgatgctacatccaaagcccatcagcttgaggaagatattgtgtcagtaacacataaagcaattgaaaaagaaaccgaattagacagtttaaaggacaaactcaagaaggcacaacatgaaagagaacaacttgaatgtcagttgaagacagagaaggatgaaaaggaactttataaggtacatttgaagaatacagaaatagaaaataccaagcttatgtcagaggtccagactttaaaaaatttagatgggaacaaagaaagcgtgattactcatttcaaagaagagattggcaggctgcagttatgtttggctgaaaaggaaaatctgcaaagaactttcctgcttacaacctcaagtaaagaagatacttgttttttaaaggagcaacttcgtaaagcagaggaacaggttcaggcaactcggcaagaagttgtctttctggctaaagaactcagtgatgctgtcaacgtacgagacagaacgatggcagacctgcatactgcacgcttggaaaacgagaaagtgaaaaagcagttagctgatgcagtggcagaacttaaactaaatgctatgaaaaaagatcaggacaagactgatacactggaacacgaactaagaagagaagttgaagatctgaaactccgtcttcagatggctgcagaccattataaagaaaaatttaaggaatgccaaaggctccaaaaacaaataaacaaactttcagatcaatcagctaataataataatgtcttcacaaagaaaacggggaatcagcagaaagtgaatgatgcttcagtaaacacagacccagccacttctgcctctactgtagatgtaaagccatcaccttctgcagcagaggcagattttgacatagtaacaaaggggcaagtctgtgaaatgaccaaagaaattgctgacaaaacagaaaagtataataaatgtaaacaactcttgcaggatgagaaagcaaaatgcaataaatatgctgatgaacttgcaaaaatggagctgaaatggaaagaacaagtgaaaattgctgaaaatgtaaaacttgaactagctgaagtacaggacaattataaagaacttaaaaggagtctagaaaatccagcagaaaggaaaatggaaggtcagaattcccagagtcctcaatgtttcaaaacatgctcagagcaaaatggttatgttctcacattgtcaaatgcacaaccagttctgcaatatggtaatccttatgcatctcaggaaacaagagatggagcagatggtgctttttacccagatgaaatacaaaggccacctgtcagagtcccctcttggggactggaagacaatgttgtctgcagccagcctgctcgaaactttagtcggcctgatggcttagaggactctgaggatagcaaagaagatgagaatgtgcctactgctcctgatcctccaagtcaacatttacgtgggcatgggacaggcttttgctttgattccagctttgatgttcacaagaagtgtcccctctgtgagttaatgtttcctcctaactatgatcagagcaaatttgaagaacatgttgaaagtcactggaaggtgtgcccgatgtgcagcgagcagttccctcctgactatgaccagcaggtgtttgaaaggcatgtgcagacccattttgatcagaatgttctaaattttgactagttactttttattatgagttaatatagtttagcagtaaaaaaaaaaaaaaaaaaccacacctaaaatagaccactgaggagaccatagagcggatgctttcatgcaccctttactgcactttctgaccaggagctactttgagtttggtgttactaggatcagggtcagtctttggcttatcaataaattttaatctctgttaatcttacctgctttaaaaaaaagttcttgtgtgttcgtatctttatttattccctagtttgcagaactgtctgaataaaggatacaaggattatttcaatgttactgcactgaaaaacgtgtatgtattagtgtgctagattatttagcagaatattcacaagtttctgttgaccttgttgattgagcatgactactaaatattatgtaataaaaagcatttgtcataacaaaaaaaaaaaaaaaaaaaaaaaaaaaaaaaaaaaaaaaaaaaaaaaaaaaaaaaaaaaaaaaaaaaaaaaaaaaaaaaaaaaaaaaaaaaaaaaaaaaaaaaaaaaaaaaaaaaaaaaaaaaaaaaaaaaaaaaaaa

SEQ ID NO: 171 - protein, 789 aa, Homo sapiens
MTSFQEVPLQTSNFAHVIFQNVAKSYLPNAHLECHYTLTPYIHPHPKDWVGIFKVGWSTARDYYTFLWSPMPEHYVEGSTVNCVLAFQGYYLPNDDGEFYQFCYVTHKGEIRGASTPFQFRASSPVEELLTMEDEGNSDMLVVTTKAGLLELKIEKTMKEKEELLKLIAVLEKETAQLREQVGRMERELNHEKERCDQLQAEQKGLTEVTQSLKMENEEFKKRFSDATSKAHQLEEDIVSVTHKAIEKETELDSLKDKLKKAQHEREQLECQLKTEKDEKELYKVHLKNTEIENTKLMSEVQTLKNLDGNKESVITHFKEEIGRLQLCLAEKENLQRTFLLTTSSKEDTCFLKEQLRKAEEQVQATRQEVVFLAKELSDAVNVRDRTMADLHTARLENEKVKKQLADAVAELKLNAMKKDQDKTDTLEHELRREVEDLKLRLQMAADHYKEKFKECQRLQKQINKLSDQSANNNNVFTKKTGNQQKVNDASVNTDPATSASTVDVKPSPSAAEADFDIVTKGQVCEMTKEIADKTEKYNKCKQLLQDEKAKCNKYADELAKMELKWKEQVKIAENVKLELAEVQDNYKELKRSLENPAERKMEGQNSQSPQCFKTCSEQNGYVLTLSNAQPVLQYGNPYASQETRDGADGAFYPDEIQRPPVRVPSWGLEDNVVCSQPARNFSRPDGLEDSEDSKEDENVPTAPDPPSQHLRGHGTGFCFDSSFDVHKKCPLCELMFPPNYDQSKFEEHVESHWKVCPMCSEQFPPDYDQQVFERHVQTHFDQNVLNFD

SEQ ID NO: 172 - DNA, 2547 bp, Homo sapiens
ggattggctgttcggagcggcgaggggcttggcgggagcttccagtcgctcgagagcggagagcggcaccatggccccgcgggggcggcggcggccgcggcctcacaggtctgagggcgcaagacgttcaaagaacactttagaaagaacacattccatgaaagataaagctggtcaaaagtgcaagcctattgacgtgttcgactttcctgataattctgatgtctcaagcattggcaggctgggtgaaaatgagaaagatgaagaaacttatgagacctttgatcctcctttacatagcacagctatatatgctgatgaagaagaattctccaaacattgtggactgtctctctcttcaactcctccaggaaaagaagcaaaaagaagttcagacacttctggaaatgaagcaagtgaaatcgaatctgtaaaaattagtgcaaaaaagccaggaagaaagctcaggcccattagtgatgactctgaaagcattgaagaaagtgatacaaggagaaaagttaaatcagcagagaaaataagtacacaacgtcatgaggttattcgaaccacagcgtcttcagaactttcagagaaaccagctgagtctgtcacttctaaaaagacaggaccccttagtgcccagccctctgttgaaaaagagaacttggcaatagaaagtcaatcgaaaactcagaaaaaagggaagatatctcatgacaaaaggaagaaatcaagaagtaaagccataggctcagatacttctgacattgtgcacatttggtgtccagaaggaatgaaaaccagtgacatcaaggagttgaatattgttttgcctgaatttgagaaaacccacctagagcatcaacaaagaatagaatctaaagtttgtaaggcagccatcgccacattttatgttaatgttaaagaacaattcatcaaaatgcttaaagaaagccagatgttgacaaatctgaaaaggaagaatgctaagatgatttcagatatcgaaaagaaaaggcagcgtatgattgaagtccaggatgaactgcttcggttagagccacagctgaaacaactacaaacaaaatatgatgaacttaaagagagaaagtcttcccttaggaatgcagcatatttcttatctaatttaaaacagctttatcaagattattcagatgttcaagctcaagaaccaaacgtaaaggaaacgtatgattcatccagccttccagctctgttatttaaagcaagaacacttctgggagccgaaagccatctgcgaaatatcaaccatcagttagagaagctccttgaccagggatgagaagagcagtctactaaaatgtgcctataggaagactagtctcatgctgttaccttctgaaactgtacctttataaatcaattgttttgcaaagaagttatggcctacttagaatctaaaatttgttattcaaattaaatggctgtgaacaatgttaaatagcatcagtttgtccaatagttttaaaggccataatcatcttttctggttaatatcttgagtaattttaaaatgttgacaccttaatcggtcccaggtatgagctataataaacttgtaaaattaagttgatgtgaacataattttgattaattaataaggcgatttctcctgaatttacaccaaagctaatttttaatgaaattggtttacagaagtaaaaaacaaaaattggaaagcaaagtaataaaacttagtttatataaacaggttgaatgatatatttatcaaatctcacagacatcaggcaaattatagcctggtgacaaaagtgttcatagtgaattagttactcttgtaatacttctataattagttcatcaggaatttcatccacttcactgttataactgagaagactgttctctgcagcttcagctaattcagcatcttcagtagcttctaaaaaataagcatcatcaatgccattatcccagacagcatcagcagatgcacctgttgacagcctgctaggtgatggtttatgaggattctgggtttcattgctcctagtttcatctgcttcatctgttgtaaactcttcttcctttatttcagtggtgaagggatagagagtgggataggaaaatatttactcaggatatgtgatttaaccttatactctatgttgaagtaaggtattaagtgacagatactaaagtgaatatgcaggaggaatgctgtctccgatatctcaccgtgggaatgagtgcactgattcaaacgttgctgcactgaagctcagacacacttgaaactccaaatttgaaattacctacagttctgtgcacatacttttcaatactccccgacggaagagcaagggtggatttaattttttaacaagtggacagtccagctgaagacaaatcagaagataaatttgctatcttgacaatggacttagtacccatgctttaaattttaaagtatttagcaaatcgtaaacatggattgaaaaaagattaaaaacagttgccaaaatataaaaaaaaaaaaaa

SEQ ID NO: 173 - protein, 418 aa, Homo sapiens
MAPRGRRRPRPHRSEGARRSKNTLERTHSMKDKAGQKCKPIDVFDFPDNSDVSSIGRLGENEKDEETYETFDPPLHSTAIYADEEEFSKHCGLSLSSTPPGKEAKRSSDTSGNEASEIESVKISAKKPGRKLRPISDDSESIEESDTRRKVKSAEKISTQRHEVIRTTASSELSEKPAESVTSKKTGPLSAQPSVEKENLAIESQSKTQKKGKISHDKRKKSRSKAIGSDTSDIVHIWCPEGMKTSDIKELNIVLPEFEKTHLEHQQRIESKVCKAAIATFYVNVKEQFIKMLKESQMLTNLKRKNAKMISDIEKKRQRMIEVQDELLRLEPQLKQLQTKYDELKERKSSLRNAAYFLSNLKQLYQDYSDVQAQEPNVKETYDSSSLPALLFKARTLLGAESHLRNINHQLEKLLDQG

SEQ ID NO: 174 - DNA, 2445 bp, Homo sapiens
acctcgttcatctccttcacctccgaaatgatctcgcttttgggtttacggccggtctcttcacctggagcatcagccgggaaggtcagggtcgccctggctcgggcctgttcacattggggtcaaaggcacacattgggggctcaaccaaggcgagctgcgttcgcggggccgggtctttccgcacaggcggagggcggtggcgggcgcggaggcgtcgcgcgagccagggggcagccacgggccgggggtacctagcgccacccgcttcgcttgcatcagctgcgcgccccatcccgaggaatggtagaggcagccccgcccccggcccgcccccgcctttccattggctgccgcgcggggcggggagcggggtcggctcagtggccctgagaccctagctctgctctcggtccgctcgctgtccgctagcccgctgcgatgttgcgcgctgccgcccgcttcgggccccgcctgggccgccgcctcttgtcagccgccgccacccaggccgtgcctgcccccaaccagcagcccgaggtcttctgcaaccagattttcataaacaatgaatggcacgatgccgtcagcaggaaaacattccccaccgtcaatccgtccactggagaggtcatctgtcaggtagctgaaggggacaaggaagatgtggacaaggcagtgaaggccgcccgggccgccttccagctgggctcaccttggcgccgcatggacgcatcacacaggggccggctgctgaaccgcctggccgatctgatcgagcgggaccggacctacctggcggccttggagaccctggacaatggcaagccctatgtcatctcctacctggtggatttggacatggtcctcaaatgtctccggtattatgccggctgggctgataagtaccacgggaaaaccatccccattgacggagacttcttcagctacacacgccatgaacctgtgggggtgtgcgggcagatcattccgtggaatttcccgctcctgatgcaagcatggaagctgggcccagccttggcaactggaaacgtggttgtgatgaaggtagctgagcagacacccctcaccgccctctatgtggccaacctgatcaaggaggctggctttccccctggtgtggtcaacattgtgcctggatttggccccacggctggggccgccattgcctcccatgaggatgtggacaaagtggcattcacaggctccactgagattggccgcgtaatccaggttgctgctgggagcagcaacctcaagagagtgaccttggagctgggggggaagagccccaacatcatcatgtcagatgccgatatggattgggccgtggaacaggcccacttcgccctgttcttcaaccagggccagtgctgctgtgccggctcccggaccttcgtgcaggaggacatctatgatgagtttgtggagcggagcgttgcccgggccaagtctcgggtggtcgggaacccctttgatagcaagaccgagcaggggccgcaggtggatgaaactcagtttaagaagatcctcggctacatcaacacggggaagcaagagggggcgaagctgctgtgtggtgggggcattgctgctgaccgtggttacttcatccagcccactgtgtttggagatgtgcaggatggcatgaccatcgccaaggaggagatcttcgggccagtgatgcagatcctgaagttcaagaccatagaggaggttgttgggagagccaacaattccacgtacgggctggccgcagctgtcttcacaaaggatttggacaaggccaattacctgtcccaggccctccaggcgggcactgtgtgggtcaactgctatgatgtgtttggagcccagtcaccctttggtggctacaagatgtcggggagtggccgggagttgggcgagtacgggctgcaggcatacactgaagtgaaaactgtcacagtcaaagtgcctcagaagaactcataagaatcatgcaagcttcctccctcagccattgatggaaagttcagcaagatcagcaacaaaaccaagaaaaatgatccttgcgtgctgaatatctgaaaagagaaatttttcctacaaaatctcttgggtcaagaaagttctagaatttgaattgataaacatggtgggttggctgagggtaagagtatatgaggaaccttttaaacgacaacaatactgctagctttcaggatgatttttaaaaaatagattcaaatgtgttatcctctctctgaaacgcttcctataactcgagtttataggggaagaaaaagctattgtttacaattatatcaccattaaggcaactgctacaccctgctttgtattctgggctaagattcattaaaaactagctgctcttaaaaaaaaaaaaaaaaaaaaaaaaaaaaaaaaaaaaaaaaaaaaaaa

SEQ ID NO: 175 - protein, 517 aa, Homo sapiens
MLRAAARFGPRLGRRLLSAAATQAVPAPNQQPEVFCNQIFINNEWHDAVSRKTFPTVNPSTGEVICQVAEGDKEDVDKAVKAARAAFQLGSPWRRMDASHRGRLLNRLADLIERDRTYLAALETLDNGKPYVISYLVDLDMVLKCLRYYAGWADKYHGKTIPIDGDFFSYTRHEPVGVCGQIIPWNFPLLMQAWKLGPALATGNVVVMKVAEQTPLTALYVANLIKEAGFPPGVVNIVPGFGPTAGAAIASHEDVDKVAFTGSTEIGRVIQVAAGSSNLKRVTLELGGKSPNIIMSDADMDWAVEQAHFALFFNQGQCCCAGSRTFVQEDIYDEFVERSVARAKSRVVGNPFDSKTEQGPQVDETQFKKILGYINTGKQEGAKLLCGGGIAADRGYFIQPTVFGDVQDGMTIAKEEIFGPVMQILKFKTIEEVVGRANNSTYGLAAAVFTKDLDKANYLSQALQAGTVWVNCYDVFGAQSPFGGYKMSGSGRELGEYGLQAYTEVKTVTVKVPQKNS

SEQ ID NO: 176 - DNA, 533 bp, Homo sapiens
gacaatgcaggaagaggctttttattgcttgtgtgtgttttcaaatcaagtaggcacaacccagtcctcataacagccctcgggagtggacgcaccggggcgggagagcgcaggagggagtgtgcttggctatcctgcccagtggaaaggaaagtgacgtgcattgatcttagagtccttggcaacagactgtggaggcaataacaggataaagaaagcagggagaacgaggcatggccagggaccccagtgcgccttcaaggagaccttaaaacagatagcaccacaagagagccacaagagagaagtgtaaaaaataagcaccaattttcattgagttatcacctacaaaaaatgtggtttccctgccctggacattctcccatcaggctctgcgggaagaaaagcggaaaaaggaagcaaataaaattaatccaaacctgtgttttagtcttaagtgcatgtagaaaaaagaaaattatcaaattttttccctccctattaaaaaaaaaaaaagtctagagcgaatcaaa

SEQ ID NO: 177 - protein, 1838 aa, Homo sapiens
MDVHTRWKARSALRPGAPLLPPLLLLLLWAPPPSRAAQPADLLKVLDFHNLPDGITKTTGFCATRRSSKGPDVAYRVTKDAQLSAPTKQLYPASAFPEDFSILTTVKAKKGSQAFLVSIYNEQGIQQIGLELGRSPVFLYEDHTGKPGPEDYPLFRGINLSDGKWHRIALSVHKKNVTLILDCKKKTTKFLDRSDHPMIDINGIIVFGTRILDEEVFEGDIQQLLFVSDHRAAYDYCEHYSPDCDTAVPDTPQSQDPNPDEYYTEGDGEGETYYYEYPYYEDPEDLGKEPTPSKKPVEAAKETTEVPEELTPTPTEAAPMPETSEGAGKEEDVGIGDYDYVPSEDYYTPSPYDDLTYGEGEENPDQPTDPGAGAEIPTSTADTSNSSNPAPPPGEGADDLEGEFTEETIRNLDENYYDPYYDPTSSPSEIGPGMPANQDTIYEGIGGPRGEKGQKGEPAIIEPGMLIEGPPGPEGPAGLPGPPGTMGPTGQVGDPGERGPPGRPGLPGADGLPGPPGTMLMLPFRFGGGGDAGSKGPMVSAQESQAQAILQQARLALRGPAGPMGLTGRPGPVGPPGSGGLKGEPGDVGPQGPRGVQGPPGPAGKPGRRGRAGSDGARGMPGQTGPKGDRGFDGLAGLPGEKGHRGDPGPSGPPGPPGDDGERGDDGEVGPRGLPGEPGPRGLLGPKGPPGPPGPPGVTGMDGQPGPKGNVGPQGEPGPPGQQGNPGAQGLPGPQGAIGPPGEKGPLGKPGLPGMPGADGPPGHPGKEGPPGEKGGQGPPGPQGPIGYPGPRGVKGADGIRGLKGTKGEKGEDGFPGFKGDMGIKGDRGEIGPPGPRGEDGPEGPKGRGGPNGDPGPLGPPGEKGKLGVPGLPGYPGRQGPKGSIGFPGFPGANGEKGGRGTPGKPGPRGQRGPTGPRGERGPRGITGKPGPKGNSGGDGPAGPPGERGPNGPQGPTGFPGPKGPPGPPGKDGLPGHPGQRGETGFQGKTGPPGPPGVVGPQGPTGETGPMGERGHPGPPGPPGEQGLPGLAGKEGTKGDPGPAGLPGKDGPPGLRGFPGDRGLPGPVGALGLKGNEGPPGPPGPAGSPGERGPAGAAGPIGIPGRPGPQGPPGPAGEKGAPGEKGPQGPAGRDGLQGPVGLPGPAGPVGPPGEDGDKGEIGEPGQKGSKGDKGEQGPPGPTGPQGPIGQPGPSGADGEPGPRGQQGLFGQKGDEGPRGFPGPPGPVGLQGLPGPPGEKGETGDVGQMGPPGPPGPRGPSGAPGADGPQGPPGGIGNPGAVGEKGEPGEAGEPGPSGRSGPPGPKGERGEKGESGPSGAAGPPGPKGPPGDDGPKGSPGPVGFPGDPGPPGEPGPAGQDGPPGDKGDDGEPGQTGSPGPTGEPGPSGPPGKRGPPGPAGPEGRQGEKGAKGEAGLEGPPGKTGPIGPQGAPGKPGPDGLRGIPGPVGEQGLPGSPGPDGPPGPMGPPGLPGLKGDSGPKGEKGHPGLIGLIGPPGEQGEKGDRGLPGPQGSSGPKGEQGITGPSGPIGPPGPPGLPGPPGPKGAKGSSGPTGPKGEAGHPGPPGPPGPPGEVIQPLPIQASRTRRNIDASQLLDDGNGENYVDYADGMEEIFGSLNSLKLEIEQMKRPLGTQQNPARTCKDLQLCHPDFPDGEYWVDPNQGCSRDSFKVYCNFTAGGSTCVFPDKKSEGARITSWPKENPGSWFSEFKRGKLLSYVDAEGNPVGVVQMTFLRLLSASAHQNVTYHCYQSVAWQDAATGSYDKALRFLGSNDEEMSYDNNPYIRALVDGCATKKGYQKTVLEIDTPKVEQVPIVDIMFNDFGEASQKFGFEVGPACFMG

SEQ ID NO: 178 - DNA, 1051 bp, Homo sapiens
ggaccgccgcctggttaaaggcgcttatttcccaggcagccgctgcagtcgccacacctttgcccctgctgcgatgaccctgtcgccacttctgctgttcctgccaccgctgctgctgctgctggacgtccccacggcggcggtgcaggcgtcccctctgcaagcgttagacttctttgggaatgggccaccagttaactacaagacaggcaatctatacctgcgggggcccctgaagaagtccaatgcaccgcttgtcaatgtgaccctctactatgaagcactgtgcggtggctgccgagccttcctgatccgggagctcttcccaacatggctgttggtcatggagatcctcaatgtcacgctggtgccctacggaaacgcacaggaacaaaatgtcagtggcaggtgggagttcaagtgccagcatggagaagaggagtgcaaattcaacaaggtggaggcctgcgtgttggatgaacttgacatggagctagccttcctgaccattgtctgcatggaagagtttgaggacatggagagaagtctgccactatgcctgcagctctacgccccagggctgtcgccagacactatcatggagtgtgcaatgggggaccgcggcatgcagctcatgcacgccaacgcccagcggacagatgctctccagccaccacacgagtatgtgccctgggtcaccgtcaatgggaaacccttggaagatcagacccagctccttacccttgtctgccagttgtaccagggcaagaagccggatgtctgcccttcctcaaccagctccctcaggagtgtttgcttcaagtgatggccggtgagctgcggagagctcatggaaggcgagtgggaacccggctgcctgcctttttttctgatccagaccctcggcacctgctacttaccaactggaaaattttatgcatcccatgaagcccagatacacaaaattccaccccatgatcaagaatcctgctccactaagaatggtgctaaagtaaaactagtttaataagcaaaaaaaaaaaaaaaaaaa

SEQ ID NO: 179 - protein, 250 aa, Homo sapiens
MTLSPLLLFLPPLLLLLDVPTAAVQASPLQALDFFGNGPPVNYKTGNLYLRGPLKKSNAPLVNVTLYYEALCGGCRAFLIRELFPTWLLVMEILNVTLVPYGNAQEQNVSGRWEFKCQHGEEECKFNKVEACVLDELDMELAFLTIVCMEEFEDMERSLPLCLQLYAPGLSPDTIMECAMGDRGMQLMHANAQRTDALQPPHEYVPWVTVNGKPLEDQTQLLTLVCQLYQGKKPDVCPSSTSSLRSVCFK

SEQ ID NO: 180 - DNA, 2579 bp, Homo sapiens
tgagaccgtcagaagcctcatagacagaacgattgatgaagtagttgagaaaggatttgaagatgatcgaattgaggctttacttcataaaattgaaatacagatgaaacatcagtctaccagctttgggctgatgctgacatcagtaagtgatctctcaacaattttgtttttgttttataatagacattttgtcttgttactagcttaactggcattttgatatttttatgtgaaatagattactttaaatgggtaagggtttataactagtaatctgttggttatttcctaaacattatttcagcctgtgctttttattttattggaacaaaacagggctaaagtaagtttttttgtttctccatccaaagaattacatgacttttgttataaacaatcatctgtggtatatttaaatacagaaactaggattttagtatcaagtctgggctgttggtggaggttgtactgtggtaccagctgcattgtggatgtggaaatcttccttccagtacatagcttcttgctggaaccatgatggggaccctgtggagctcttgaagttgggaaatcagttagctaaattcagacagtgcctgcaggaaaatccaaaatttttgcaagaaaaagtaaaacagtattttaagaataaccagcataagctgactttatcgatgaggccagatgacaagtatcacgagaagcaggcacaggtggaagccacgaagctcaagcagaaggtcgaggctctgtcccccggagacaggcagcagatctacgagaaaggtctagaattacggagtcaacaaagcaaacctcaagatgcctcttgtctgccagcgttgaaagtttccgatattgaacccaccatacctgtcacagagttggacgtggtcctgacagctggagatatccctgttcagtactgcgcccagcccaccaatggcatggtgtatttccgggccttctccagcctgaacacactccccgaggagctgaggccctatgtgcccctcttctgcagcgtcctcaccaagctgggctgcggccttcttgactaccgggagcaggctcagcagatagaattgaagaccggagggatgagtgcttctccccacgtgctccccgacgactcacacatggacacctacgagcagggtgtgcttttctcctctctctgcctggatcgaaacctgccagacatgatgcagctatggagtgaaatatttaacaacccgtgctttgaagaagaggagcacttcaaggtgctggtgaagatgaccgcccaggagctcgccaatggaattcctgactctgggcacctgtacgcatccatcagggcaggccggaccctcacgcccgcaggggacctgcaggagaccttcagcgggatggatcaggtgcggctgatgaagaggattgcagaaatgacagatatcaaacccatcctgaggaagctcccacgtatcaagaaacacttgttaaatggtgataatatgaggtgttcagtgaatgcgactcctcagcagatgcctcagacagaaaaagcggtcgaagacttccttagaagcatcggtcggagtaaaaaggaacggaggcctgtgcgcccacacacggtcgagaaacctgtgcccagcagctctggtggagatgcccacgttccccatggctcccaggtcattaggaagctggtcatggaacccaccttcaagccctggcagatgaagactcacttcctgatgcccttcccggtgaattacgtgggtgaatgcatccgaactgtcccctacacggacccagatcatgccagtcttaaaatccttgcacgtttgatgactgccaaattcttgcatacagaaattcgagaaaaaggcggtgcttatggtggaggcgcaaaactcagccacaatgggattttcaccctttactcttacagggacccaaatacaatagagacgctccagtcttttgggaaggctgtcgactgggctaagtctggaaaattcacacagcaagacatcgacgaagccaaactttctgtcttctcaaccgtagatgctcctgtcgctccttcagacaaaggaatggaccacttcttgtacggcctctcggatgagatgaagcaggcccacagagagcagctctttgctgtcagccacgacaagctcctggccgtgagcgatagatacctcggcactgggaagagcacacacggcctggccatcctcggacccgagaacccgaaaattgccaaggacccatcctggatcatccgatgagcagccgtggcgctcgactgcacaggagcccgagacaatacacctccgagctgaatatgaaaagtcagaaatgctactgctttttccaagaatattatgtcattgagtgtcgccaaagcccttgactggcgagtcaaaaactcagatctatcttaagagtgaccaggaagaggttcattgaaataatcatgcatgaagcgccaaagatgcaccatgtagaattttcactttgtactggcaggctcgttttacctcattctagaatatttaagaatctaaaaataaagggcaactctg

SEQ ID NO: 181 - protein, 595 aa, Homo sapiens
MWKSSFQYIASCWNHDGDPVELLKLGNQLAKFRQCLQENPKFLQEKVKQYFKNNQHKLTLSMRPDDKYHEKQAQVEATKLKQKVEALSPGDRQQIYEKGLELRSQQSKPQDASCLPALKVSDIEPTIPVTELDVVLTAGDIPVQYCAQPTNGMVYFRAFSSLNTLPEELRPYVPLFCSVLTKLGCGLLDYREQAQQIELKTGGMSASPHVLPDDSHMDTYEQGVLFSSLCLDRNLPDMMQLWSEIFNNPCFEEEEHFKVLVKMTAQELANGIPDSGHLYASIRAGRTLTPAGDLQETFSGMDQVRLMKRIAEMTDIKPILRKLPRIKKHLLNGDNMRCSVNATPQQMPQTEKAVEDFLRSIGRSKKERRPVRPHTVEKPVPSSSGGDAHVPHGSQVIRKLVMEPTFKPWQMKTHFLMPFPVNYVGECIRTVPYTDPDHASLKILARLMTAKFLHTEIREKGGAYGGGAKLSHNGIFTLYSYRDPNTIETLQSFGKAVDWAKSGKFTQQDIDEAKLSVFSTVDAPVAPSDKGMDHFLYGLSDEMKQAHREQLFAVSHDKLLAVSDRYLGTGKSTHGLAILGPENPKIAKDPSWIIR

SEQ ID NO: 182 - DNA, 1963 bp, Homo sapiens
cgaacacctccaacatgaagcttcttcatgttttcctgttatttctgtgcttccacttaaggttttgcaaggtcacttatacatctcaagaggatctggtggagaaaaagtgcttagcaaaaaaatatactcacctctcctgcgataaagtcttctgccagccatggcagagatgcattgagggcacctgtgtttgtaaactaccgtatcagtgcccaaagaatggcactgcagtgtgtgcaactaacaggagaagcttcccaacatactgtcaacaaaagagtttggaatgtcttcatccagggacaaagtttttaaataacggaacatgcacagccgaaggaaagtttagtgtttccttgaagcatggaaatacagattcagagggaatagttgaagtaaaacttgtggaccaagataagacaatgttcatatgcaaaagcagctggagcatgagggaagccaacgtggcctgccttgaccttgggtttcaacaaggtgctgatactcaaagaaggtttaagttgtctgatctctctataaattccactgaatgtctacatgtgcattgccgaggattagagaccagtttggctgaatgtacttttactaagagaagaactatgggttaccaggatttcgctgatgtggtttgttatacacagaaagcagattctccaatggatgacttctttcagtgtgtgaatgggaaatacatttctcagatgaaagcctgtgatggtatcaatgattgtggagaccaaagtgatgaactgtgttgtaaagcatgccaaggcaaaggcttccattgcaaatcgggtgtttgcattccaagccagtatcaatgcaatggtgaggtggactgcattacaggggaagatgaagttggctgtgcaggctttgcatctgtggctcaagaagaaacagaaattttgactgctgacatggatgcagaaagaagacggataaaatcattattacctaaactatcttgtggagttaaaaacagaatgcacattcgaaggaaacgaattgtgggaggaaagcgagcacaactgggagacctcccatggcaggtggcaattaaggatgccagtggaatcacctgtgggggaatttatattggtggctgttggattctgactgctgcacattgtctcagagccagtaaaactcatcgttaccaaatatggacaacagtagtagactggatacaccccgaccttaaacgtatagtaattgaatacgtggatagaattattttccatgaaaactacaatgcaggcacttaccaaaatgacatcgctttgattgaaatgaaaaaagacggaaacaaaaaagattgtgagctgcctcgttccatccctgcctgtgtcccctggtctccttacctattccaacctaatgatacatgcatcgtttctggctggggacgagaaaaagataacgaaagagtcttttcacttcagtggggtgaagttaaactaataagcaactgctctaagttttacggaaatcgtttctatgaaaaagaaatggaatgtgcaggtacatatgatggttccatcgatgcctgtaaaggggactctggaggccccttagtctgtatggatgccaacaatgtgacttatgtctggggtgttgtgagttggggggaaaactgtggaaaaccagagttcccaggtttttacaccaaagtggccaattattttgactggattagctaccatgtaggaaggccttttatttctcagtacaatgtataaaattgtgatctctctcttcattctattctttttctctcaagagttccatttaatggaaataaaacggtataattaataattctctaggggggaaaaatgaagcaaatctcattggatatttttaaaggtctccacagagtttatgccatattggaattttgttgtataattctcaaataaatattttggtgaagcat

SEQ ID NO: 183 - protein, 583 aa, Homo sapiens
MKLLHVFLLFLCFHLRFCKVTYTSQEDLVEKKCLAKKYTHLSCDKVFCQPWQRCIEGTCVCKLPYQCPKNGTAVCATNRRSFPTYCQQKSLECLHPGTKFLNNGTCTAEGKFSVSLKHGNTDSEGIVEVKLVDQDKTMFICKSSWSMREANVACLDLGFQQGADTQRRFKLSDLSINSTECLHVHCRGLETSLAECTFTKRRTMGYQDFADVVCYTQKADSPMDDFFQCVNGKYISQMKACDGINDCGDQSDELCCKACQGKGFHCKSGVCIPSQYQCNGEVDCITGEDEVGCAGFASVAQEETEILTADMDAERRRIKSLLPKLSCGVKNRMHIRRKRIVGGKRAQLGDLPWQVAIKDASGITCGGIYIGGCWILTAAHCLRASKTHRYQIWTTVVDWIHPDLKRIVIEYVDRIIFHENYNAGTYQNDIALIEMKKDGNKKDCELPRSIPACVPWSPYLFQPNDTCIVSGWGREKDNERVFSLQWGEVKLISNCSKFYGNRFYEKEMECAGTYDGSIDACKGDSGGPLVCMDANNVTYVWGVVSWGENCGKPEFPGFYTKVANYFDWISYHVGRPFISQYNV

SEQ ID NO: 184 - DNA, 3243 bp, Homo sapiens
agtagagcctggtgcctgggagcggctggcgcggcggaatccagggccgacccgggccggaccgaccccaggcggcgacggaatcagtccccaatgcctggaaattcctcattggattactgtgttttaaacagaatttcgtgaacagccttttatctccaagcggaaagaaagatgtggaaagcttcagcaggccacgctgtgtccatcgcccaggatgacgcgggggccgatgactgggagaccgaccctgattttgtgaatgatgtgagtgagaaggagcaaagatggggtgccaagacggtgcagggctccgggcaccaggagcatatcaacatacacaagctgagggagaatgtctttcaagagcatcagacccttaaggagaaggaacttgaaacaggaccaaaagcttcccatggctatggagggaaatttggtgtggaacaagaccgaatggataagtcagctgtcggccacgaatatcagtcgaaactttccaagcactgctcgcaggtggactcggtccgtggcttcggaggcaagtttggtgtccagatggacagagttgatcagtctgctgtaggctttgaataccaggggaagactgagaagcatgcctcccagaaagactactccagtggttttggcggcaagtatggcgtgcaggccgaccgagtagacaagagcgcggtgggcttcgactaccagggcaagacggagaagcacgagtcacagagagattactccaaaggtttcggcggcaaatacggtatcgacaaggacaaagtggataagagcgccgttggctttgagtatcaaggcaaaacggagaagcacgagtcccagaaagactatgtgaaagggtttggaggaaaatttggtgtgcagacagacagacaagacaaatgtgcccttggctgggatcaccaggagaaattgcagctgcatgaatcccaaaaagattataagactggttttggaggcaaattcggtgttcagtcggagaggcaggactccgctgctgtggggtttgattacaaggagaagctggccaagcacgagtcccagcaagactactccaaaggattcggcgggaagtatggggtgcagaaggatcggatggataagaatgcgtcaacctttgaggatgtcacccaggtgtcctctgcctaccagaagacagtacctgtcgaagctgtgaccagcaaaacaagtaacatcagagctaactttgaaaacctcgctaaggagaaagagcaggaggacaggcggaaggcggaggcggagagagcccagcggatggccaaggagcggcaggagcaggaagaggccaggaggaagctggaggagcaagccagagccaaaacgcaaacgccccctgtgtcgcccgcacctcagccaaccgaggagaggctgccctcgagccccgtctatgaggatgcggcttccttcaaggcagagctgagctacagaggccctgtgagtgggacggagccggagcccgtgtacagcatggaggccgctgactaccgagaggccagcagccagcagggcctggcctatgccacagaggctgtctatgaaagcgcagaggccccgggccactatcccgcagaggacagcacctacgatgagtacgagaacgatctggggatcacagccgtcgccctgtacgactaccaggctgcgggcgatgatgagatctcatttgaccctgatgacatcatcaccaacatcgagatgattgacgacggctggtggcgcggggtgtgcaagggccggtacgggctcttcccagccaactatgtggagctgcggcagtagggcccccagcccccccccggagctgcgccctggatcctcacactacagatcaggccttctttggttcttgggtggttttgggttttttctgttttttttttttttttttttttttgaaggtggggaggggaatatacacattgcttttatatttaatacttttgctgatgcttttgaaaatgtttatgccacagaatttgctaatatattgtaatcacattccttaggaggactttggtaattggttttatgcattgatggttttttttttcttttttgccaaattgactgtcacgcggcagcttcagggagctcgcattctcttgtgttcgtgttgccctcgtgcccatcaagtgcagtcgggacctcccaggacaagcacgaggcctcaggtcggccctgtggcgggtaggcaggaaggactgtcccagacgaggggcttcctctagagtctcactgctggggaggagaggactgggcctgatggaagttaacccggagctaagtcacccagagcacaggagctgccatgtcagatgggaaatctgcctatgtcataccgtgacagcccgcaggatcaggtgacttctagcagagaccctggtttttttcctgtgcccactccggcttgtcctcatctctacccatcccctgatgcccaggtcaccgggagggctgctgggagcctctcctgtccccgccgggcagtgtcactgagtccttgaaatcctcccctgccccgcgggtctctggattgggacgcacagtgcagttgaggtctgcgtcgggcttggcttttcacaaaggctgatgtcttaactgtcacccatatggtccctgggccaccgggcagcctggggcggtgtgtgtgccatgtcacagcatggcctctcggccttgggaaggaaggcagtgcctgctctgctgtgagccgccaggaaccctcctcctgtcaatgggggtgtagtatttttgccaaaatatcatgttcaatttcagtagtttgatcagttgaaggctagaagtgtgaagtgcagatgagtgtgtgttcttccccaaggtccccccacagctccaggacaccgctgtcctggcatttgtggccactcactttgtaggaaactcatctccttcctgaggagccgggaggctggaccagtcccgtcgtgcagtcaggtgggcggtgtgtctttccagaaggtcacgtggaaatgtctcgggacttgggtcccggagtgcccgtgaagcgtgtttttgctcctgaggtgcattttctcatcatccttgctttaccacaatgagcaatgaggtcgggttttatatgcaacttattgtatctgaattcctgtagcacacctcataggtatgatttttttaaattaaagaattcagaataaacattttttgatccaaaaa

SEQ ID NO: 185 - protein, 550 aa, Homo sapiens
MWKASAGHAVSIAQDDAGADDWETDPDFVNDVSEKEQRWGAKTVQGSGHQEHINIHKLRENVFQEHQTLKEKELETGPKASHGYGGKFGVEQDRMDKSAVGHEYQSKLSKHCSQVDSVRGFGGKFGVQMDRVDQSAVGFEYQGKTEKHASQKDYSSGFGGKYGVQADRVDKSAVGFDYQGKTEKHESQRDYSKGFGGKYGIDKDKVDKSAVGFEYQGKTEKHESQKDYVKGFGGKFGVQTDRQDKCALGWDHQEKLQLHESQKDYKTGFGGKFGVQSERQDSAAVGFDYKEKLAKHESQQDYSKGFGGKYGVQKDRMDKNASTFEDVTQVSSAYQKTVPVEAVTSKTSNIRANFENLAKEKEQEDRRKAEAERAQRMAKERQEQEEARRKLEEQARAKTQTPPVSPAPQPTEERLPSSPVYEDAASFKAELSYRGPVSGTEPEPVYSMEAADYREASSQQGLAYATEAVYESAEAPGHYPAEDSTYDEYENDLGITAVALYDYQAAGDDEISFDPDDIITNIEMIDDGWWRGVCKGRYGLFPANYVELRQ

SEQ ID NO: 186 - DNA, 3597 bp, Homo sapiens
ggcgaatggagcaggggcgcgcagataattaaagatttacacacagctggaagaaatcatagagaagccgggcgtggtggctcatgcctataatcccagcacttttggaggctgaggcgggcagatcacttgagatcaggagttcgagaccagcctggtgccttggcatctcccaatggggtggctttgctctgggctcctgttccctgtgagctgcctggtcctgctgcaggtggcaagctctgggaacatgaaggtcttgcaggagcccacctgcgtctccgactacatgagcatctctacttgcgagtggaagatgaatggtcccaccaattgcagcaccgagctccgcctgttgtaccagctggtttttctgctctccgaagcccacacgtgtatccctgagaacaacggaggcgcggggtgcgtgtgccacctgctcatggatgacgtggtcagtgcggataactatacactggacctgtgggctgggcagcagctgctgtggaagggctccttcaagcccagcgagcatgtgaaacccagggccccaggaaacctgacagttcacaccaatgtctccgacactctgctgctgacctggagcaacccgtatccccctgacaattacctgtataatcatctcacctatgcagtcaacatttggagtgaaaacgacccggcagatttcagaatctataacgtgacctacctagaaccctccctccgcatcgcagccagcaccctgaagtctgggatttcctacagggcacgggtgagggcctgggctcagtgctataacaccacctggagtgagtggagccccagcaccaagtggcacaactcctacagggagcccttcgagcagcacctcctgctgggcgtcagcgtttcctgcattgtcatcctggccgtctgcctgttgtgctatgtcagcatcaccaagattaagaaagaatggtgggatcagattcccaacccagcccgcagccgcctcgtggctataataatccaggatgctcaggggtcacagtgggagaagcggtcccgaggccaggaaccagccaagtgcccacactggaagaattgtcttaccaagctcttgccctgttttctggagcacaacatgaaaagggatgaagatcctcacaaggctgccaaagagatgcctttccagggctctggaaaatcagcatggtgcccagtggagatcagcaagacagtcctctggccagagagcatcagcgtggtgcgatgtgtggagttgtttgaggccccggtggagtgtgaggaggaggaggaggtagaggaagaaaaagggagcttctgtgcatcgcctgagagcagcagggatgacttccaggagggaagggagggcattgtggcccggctaacagagagcctgttcctggacctgctcggagaggagaatgggggcttttgccagcaggacatgggggagtcatgccttcttccaccttcgggaagtacgagtgctcacatgccctgggatgagttcccaagtgcagggcccaaggaggcacctccctggggcaaggagcagcctctccacctggagccaagtcctcctgccagcccgacccagagtccagacaacctgacttgcacagagacgcccctcgtcatcgcaggcaaccctgcttaccgcagcttcagcaactccctgagccagtcaccgtgtcccagagagctgggtccagacccactgctggccagacacctggaggaagtagaacccgagatgccctgtgtcccccagctctctgagccaaccactgtgccccaacctgagccagaaacctgggagcagatcctccgccgaaatgtcctccagcatggggcagctgcagcccccgtctcggcccccaccagtggctatcaggagtttgtacatgcggtggagcagggtggcacccaggccagtgcggtggtgggcttgggtcccccaggagaggctggttacaaggccttctcaagcctgcttgccagcagtgctgtgtccccagagaaatgtgggtttggggctagcagtggggaagaggggtataagcctttccaagacctcattcctggctgccctggggaccctgccccagtccctgtccccttgttcacctttggactggacagggagccacctcgcagtccgcagagctcacatctcccaagcagctccccagagcacctgggtctggagccgggggaaaaggtagaggacatgccaaagcccccacttccccaggagcaggccacagacccccttgtggacagcctgggcagtggcattgtctactcagcccttacctgccacctgtgcggccacctgaaacagtgtcatggccaggaggatggtggccagacccctgtcatggccagtccttgctgtggctgctgctgtggagacaggtcctcgccccctacaacccccctgagggccccagacccctctccaggtggggttccactggaggccagtctgtgtccggcctccctggcaccctcgggcatctcagagaagagtaaatcctcatcatccttccatcctgcccctggcaatgctcagagctcaagccagacccccaaaatcgtgaactttgtctccgtgggacccacatacatgagggtctcttaggtgcatgtcctcttgttgctgagtctgcagatgaggactagggcttatccatgcctgggaaatgccacctcctggaaggcagccaggctggcagatttccaaaagacttgaagaaccatggtatgaaggtgattggccccactgacgttggcctaacactgggctgcagagactggaccccgcccagcattgggctgggctcgccacatcccatgagagtagagggcactgggtcgccgtgccccacggcaggcccctgcaggaaaactgaggcccttgggcacctcgacttgtgaacgagttgttggctgctccctccacagcttctgcagcagactgtccctgttgtaactgcccaaggcatgttttgcccaccagatcatggcccacgtggaggcccacctgcctctgtctcactgaactagaagccgagcctagaaactaacacagccatcaagggaatgacttgggcggccttgggaaatcgatgagaaattgaacttcagggagggtggtcattgcctagaggtgctcattcatttaacagagcttccttaggttgatgctggaggcagaatcccggctgtcaaggggtgttcagttaaggggagcaacagaggacatgaaaaattgctatgactaaagcagggacaatttgctgccaaacacccatgcccagctgtatggctgggggctcctcgtatgcatggaacccccagaataaatatgctcagccaccctgtgggccgggcaatccagacagcaggcataaggcaccagttaccctgcatgttggcccagacctcaggtgctagggaaggcgggaaccttgggttgagtaatgctcgtctgtgtgttttagtttcatcacctgttatctgtgtttgctgaggagagtggaacagaaggggtggagttttgtataaataaagtttctttgtctc

SEQ ID NO: 187 - protein, 825 aa, Homo sapiens
MGWLCSGLLFPVSCLVLLQVASSGNMKVLQEPTCVSDYMSISTCEWKMNGPTNCSTELRLLYQLVFLLSEAHTCIPENNGGAGCVCHLLMDDVVSADNYTLDLWAGQQLLWKGSFKPSEHVKPRAPGNLTVHTNVSDTLLLTWSNPYPPDNYLYNHLTYAVNIWSENDPADFRIYNVTYLEPSLRIAASTLKSGISYRARVRAWAQCYNTTWSEWSPSTKWHNSYREPFEQHLLLGVSVSCIVILAVCLLCYVSITKIKKEWWDQIPNPARSRLVAIIIQDAQGSQWEKRSRGQEPAKCPHWKNCLTKLLPCFLEHNMKRDEDPHKAAKEMPFQGSGKSAWCPVEISKTVLWPESISVVRCVELFEAPVECEEEEEVEEEKGSFCASPESSRDDFQEGREGIVARLTESLFLDLLGEENGGFCQQDMGESCLLPPSGSTSAHMPWDEFPSAGPKEAPPWGKEQPLHLEPSPPASPTQSPDNLTCTETPLVIAGNPAYRSFSNSLSQSPCPRELGPDPLLARHLEEVEPEMPCVPQLSEPTTVPQPEPETWEQILRRNVLQHGAAAAPVSAPTSGYQEFVHAVEQGGTQASAVVGLGPPGEAGYKAFSSLLASSAVSPEKCGFGASSGEEGYKPFQDLIPGCPGDPAPVPVPLFTFGLDREPPRSPQSSHLPSSSPEHLGLEPGEKVEDMPKPPLPQEQATDPLVDSLGSGIVYSALTCHLCGHLKQCHGQEDGGQTPVMASPCCGCCCGDRSSPPTTPLRAPDPSPGGVPLEASLCPASLAPSGISEKSKSSSSFHPAPGNAQSSSQTPKIVNFVSVGPTYMRVS

SEQ ID NO: 188 - DNA, 613 bp, Homo sapiens
  misc_feature (149)..(149): n is a, c, g, or t
  misc_feature (155)..(157): n is a, c, g, or t
  misc_feature (160)..(160): n is a, c, g, or t
  misc_feature (180)..(180): n is a, c, g, or t
  misc_feature (201)..(201): n is a, c, g, or t
  misc_feature (203)..(203): n is a, c, g, or t
  misc_feature (396)..(396): n is a, c, g, or t
  misc_feature (411)..(411): n is a, c, g, or t
  misc_feature (454)..(454): n is a, c, g, or t
  misc_feature (475)..(475): n is a, c, g, or t
  misc_feature (495)..(495): n is a, c, g, or t
  misc_feature (514)..(514): n is a, c, g, or t
  misc_feature (521)..(521): n is a, c, g, or t
  misc_feature (530)..(530): n is a, c, g, or t
  misc_feature (553)..(553): n is a, c, g, or t
  misc_feature (564)..(564): n is a, c, g, or t
  misc_feature (579)..(579): n is a, c, g, or t
  misc_feature (586)..(586): n is a, c, g, or t
  misc_feature (607)..(607): n is a, c, g, or t
  misc_feature (613)..(613): n is a, c, g, or t
tcctggtgtttcaaatatttattttaggtagtaaaggcttttgtcgttctaaatcctgattacaagtcacatgatcaagaacaactaataaaggagattcaggagcatgttaaaaaaactacagcaccttacaaatatcccagaaaggnaggggnnnccnaattataacgaatatttgcncagtgttgtggacaatttcangngtttatttttacattttaatgaatattttcttcacacatgctgcaccacatgtcccaaactgaactgatgacatatgggtaagaatcagaatctttgagattaaaatgaaaccctgaaacctattttggtttgggtcctttggcttactggactcacagtaaatacttaatatccaagacaactttcctaacnataccctttttcccnattttgggctgttaccccaaacccattcccaaggactaattcnaattcttccacctagaattcntaatccaaactggccaaaanaattgggccttatgtaagntaaaaanttccgggcnaatttcctcccccggatgccaanggtggaatttntccagggggccaagnctatcgngggaaggcaaaaggaatgacngggggn

SEQ ID NO: 189 - protein, 328 aa, Homo sapiens
MATKRLARQLGLIRRKSIAPANGNLGRSKSKQLFDYLIVIDFESTCWNDGKHHHSQEIIEFPAVLLNTSTGQIDSEFQAYVQPQEHPILSEFCMELTGIKQAQVDEGVPLKICLSQFCKWIHKIQQQKNIIFATGISEPSASEVKLCAFVTWSDWDLGVCLEYECKRKQLLKPVFLNSWIDLRATYKLFYRRKPKGLSGALQEVGIEFSGREHSGLDDSRNTALLAWKMIRDGCVMKITRSLNKGPFLLPSWTWNSDLASGDQHAFLKQEFGCGTYRTLLQKPNMSKQEKGNILWLTMVWLSLACLQRKNYNDCMLNTASQTVTTEKF

SEQ ID NO: 190 - DNA, 3082 bp, Homo sapiens
agggagtcgtgtcggcgccaccccggcccccgagcccgcagattgcccaccgaagctcgtgtgtgcacccccgatcccgccagccactcgcccctggcctcgcgggccgtgtctccggcatcatgtgtggtatatttgcttacttaaactaccatgttcctcgaacgagacgagaaatcctggagaccctaatcaaaggccttcagagactggagtacagaggatatgattctgctggtgtgggatttgatggaggcaatgataaagattgggaagccaatgcctgcaaaacccagcttattaagaagaaaggaaaagttaaggcactggatgaagaagttcacaagcaacaagatatggatttggatatagaatttgatgtacaccttggaatagctcatacccgttgggcaacacatggagaacccagtcctgtcaatagccacccccagcgctctgataaaaataatgaatttatcgttattcacaatggaatcatcaccaactacaaagacttgaaaaagtttttggaaagcaaaggctatgacttcgaatctgaaacagacacagagacaattgccaagctcgttaagtatatgtatgacaatcgggaaagtcaagataccagctttactaccttggtggagagagttatccaacaattggaaggtgcttttgcacttgtgtttaaaagtgttcattttcccgggcaagcagttggcacaaggcgaggtagccctctgttgattggtgtacggagtgaacataaactttctactgatcacattcctatactctacagaacaggcaaagacaagaaaggaagctgcaatctctctcgtgtggacagcacaacctgccttttcccggtggaagaaaaagcagtggagtattactttgcttctgatgcaagtgctgtcatagaacacaccaatcgcgtcatctttctggaagatgatgatgttgcagcagtagtggatggacgtctttctatccatcgaattaaacgaactgcaggagatcaccccggacgagctgtgcaaacactccagatggaactccagcagatcatgaagggcaacttcagttcatttatgcagaaggaaatatttgagcagccagagtctgtcgtgaacacaatgagaggaagagtcaactttgatgactatactgtgaatttgggtggtttgaaggatcacataaaggagatccagagatgccggcgtttgattcttattgcttgtggaacaagttaccatgctggtgtagcaacacgtcaagttcttgaggagctgactgagttgcctgtgatggtggaactagcaagtgacttcctggacagaaacacaccagtctttcgagatgatgtttgctttttccttagtcaatcaggtgagacagcagatactttgatgggtcttcgttactgtaaggagagaggagctttaactgtggggatcacaaacacagttggcagttccatatcacgggagacagattgtggagttcatattaatgctggtcctgagattggtgtggccagtacaaaggcttataccagccagtttgtatcccttgtgatgtttgcccttatgatgtgtgatgatcggatctccatgcaagaaagacgcaaagagatcatgcttggattgaaacggctgcctgatttgattaaggaagtactgagcatggatgacgaaattcagaaactagcaacagaactttatcatcagaagtcagttctgataatgggacgaggctatcattatgctacttgtcttgaaggggcactgaaaatcaaagaaattacttatatgcactctgaaggcatccttgctggtgaattgaaacatggccctctggctttggtggataaattgatgcctgtgatcatgatcatcatgagagatcacacttatgccaagtgtcagaatgctcttcagcaagtggttgctcggcaggggcggcctgtggtaatttgtgataaggaggatactgagaccattaagaacacaaaaagaacgatcaaggtgccccactcagtggactgcttgcagggcattctcagcgtgatccctttacagttgctggctttccaccttgctgtgctgagaggctatgatgttgatttcccacggaatcttgccaaatctgtgactgtagagtgaggaatatctatacaaaatgtacgaaactgtatgattaagcaacacaagacaccttttgtatttaaaaccttgatttaaaatatcaccccttgaagcctttttttagtaaatccttatttatatatcagttataattattccactcaatatgtgatttttgtgaagttacctcttacattttcccagtaatttgtggaggactttgaataatggaatctatattggaatctgtatcagaaagattctagctattattttctttaaagaatgctgggtgttgcatttctggaccctccacttcaatctgagaagacaatatgtttctaaaaattggtacttgtttcaccatacttcattcagaccagtgaaagagtagtgcatttaattggagtatctaaagccagtggcagtgtatgctcatacttggacagttagggaagggtttgccaagttttaagagaagatgtgatttattttgaaatttgtttctgttttgtttttaaatcaaactgtaaaacttaaaactgaaaaattttattggtaggatttatatctaagtttggttagccttagtttctcagacttgttgtctattatctgtaggtggaagaaatttaggaagcgaaatattacagtagtgcattggtgggtctcaatccttaacatatttgcacaattttatagcacaaactttaaattcaagctgctttggacaactgacaatatgattttaaatttgaagatgggatgtgtacatgttgggtatcctactactttgtgttttcatctcctaaaagtgttttttatttccttgtatctgtagtcttttattttttaaatgactgctgaatgacatattttatcttgttctttaaaatcacaacacagagctgctattaaattaatattgatat

SEQ ID NO: 191 - protein, 681 aa, Homo sapiens
MCGIFAYLNYHVPRTRREILETLIKGLQRLEYRGYDSAGVGFDGGNDKDWEANACKTQLIKKKGKVKALDEEVHKQQDMDLDIEFDVHLGIAHTRWATHGEPSPVNSHPQRSDKNNEFIVIHNGIITNYKDLKKFLESKGYDFESETDTETIAKLVKYMYDNRESQDTSFTTLVERVIQQLEGAFALVFKSVHFPGQAVGTRRGSPLLIGVRSEHKLSTDHIPILYRTGKDKKGSCNLSRVDSTTCLFPVEEKAVEYYFASDASAVIEHTNRVIFLEDDDVAAVVDGRLSIHRIKRTAGDHPGRAVQTLQMELQQIMKGNFSSFMQKEIFEQPESVVNTMRGRVNFDDYTVNLGGLKDHIKEIQRCRRLILIACGTSYHAGVATRQVLEELTELPVMVELASDFLDRNTPVFRDDVCFFLSQSGETADTLMGLRYCKERGALTVGITNTVGSSISRETDCGVHINAGPEIGVASTKAYTSQFVSLVMFALMMCDDRISMQERRKEIMLGLKRLPDLIKEVLSMDDEIQKLATELYHQKSVLIMGRGYHYATCLEGALKIKEITYMHSEGILAGELKHGPLALVDKLMPVIMIIMRDHTYAKCQNALQQVVARQGRPVVICDKEDTETIKNTKRTIKVPHSVDCLQGILSVIPLQLLAFHLAVLRGYDVDFPRNLAKSVTVE

SEQ ID NO: 192 - DNA, 5293 bp, Homo sapiens
cgcgcgtgtgtttatgtgtctgtgtgcgtgtgtgtgtgtgtctctctctgtgtgtgtgtgagatgaattggagtcatacgactgggtgtttccttccgagtggttttcatcagcaatccattaggaaatcatggaaactttttttttcctggctaaaaggatgaaaactgagtcatccacttttgactgtcatccatggaagagctcctattaaaagcctcagactttcgggacctatgattctttggcacaaccttttggaaaattcttaagcagggatgaagcaaacttgattggagttggggagaaagaagacagattagtacttttcatgctgacaaaaaatagctgctatgacttttcccgcaacgtggacaggggccaagtgaagctgaactggtcatggtctgtcgcccagtgttcccttgtcgtcggcgattttgcccccgacccttcttggtgggcttagtggtggcaatctgtctcttctaccagactctgaccctccgagggtcgaggaagctcacagccgctgcccctggggctgtcccacacacatccactgaaacccaggcaagcagatgcaagaaaggattctctcaggacaaacagtgcttccttctctctggtaatgcccaggaaaccagaaaggtcaaagaatcaatggagacacactttggcagccatggccgaagggccatactctacaggcctcctttctacagcaaaacagagcttcagctacaccagcacattctgactcaacatggctatacggttgtcatcgctgaagaaaggctcaatgctggcctagggccggggctactagaacaaggtgatctgggctcttgggatctgctcatttgcctgtcttctaagaaagcagaaggaacaccctgtatatccaaggaagtcatgcgccagttaggtttacatcaaaaggcaaacagattaccagaaatacagcagccactttgcagaaaggaaggattatgtcaaatagttagaagattcccagaactgcaacttccagtgagtccctctgtgtgtctggatcagggaatgcaattaaagccgagtacttcgagtcaccttttaaaaacagtgaagccacgtgtgtggaaaccaggggactggagtcgtgaacagctgaatgaaacgacagtccttgctccacatgaaacaacctttcgagccgaagatctatctgtgattcttaaagcgtatgtgttggtgacgtccttaacccctttgcgtgcattcattcattcgactggcacagtttggaatccaccaaagaaaaaacgcttcactgtcaagctgcaaacattttttgagacattcctgagagccagttcacctcaacaggcttttgacattatgaaggaagcaattggcaaactactgctagcggctgaagtattcagtgaaacatctactctgggaccaaagaccttccatagatgcagattctgctttcaacttctaacttttgatattggttatggcagtttcatgtaccctgtagtgctccaggtacacgagcatttaaattttcaagattatgataatatggattttgaggaccaaaatacagaagaattccttttaaatgacactttcaattttctcttccctaatgaatcatcactttccatattttctgagatatttcagagactttatagatcagatgttttcaagggtgaaaactatcaaaaggaactaaatcagtgtctgtccttagaagaaattaactcaattatgactttcataaaggaacttggaagtctgggacaattccaactgctcttcccatctactactcctgggattcagtcactgatgcatgaattttatgatgtggcaaatcctgtgggaaatcctggctcagtcctgacccaatactggtctcttttaaatgtatttgaacaatttcagttcatgaataaaaagacacagccacatccactggaatggaattctttcacagaagataagaacattgaaaaaccacaagtgccatttgatgcaatagaaaataaaaaagctgcagttccacaaattaaaaatgaaaataaagaaatacattgcagtgatgatgaaaacacaccatgtcatatcaagcagatcttcacacatccacatttggaactaaatcctgactttcatccaaagatcaaagattattactgtgaagtcccatttgatgtggtaacagtgacaattggagtggaaactcctaagtgtctgtgcaaggtgcacctgtacgagcaggcagggccaagctttgccagctaccctctgggcttaggaatgaacagaatctcaatatttgttgtggatgaatctccagcacacggtgagactctgatcacgtacaaactcaccatctatagagaagaccgcccaagtctgcccttgtttgaggccttcacagcatgtggttttgtgcaggattgtggtttgctgattcatccagaggaaacctgtgggttacagcctatttcttctgactacattgaagccattttacagtctgaactaaaaagatgtccatctggggacatgaaaggccagtggattgtgccttgccttagttgttcggacaacaggacgtgtgactggagagaaataacctggcagccccacaactgccaatatggtgtcctaactaagcctcaactccagcagtgcctgggaggaaggaagattctgttcattggagattcaaccaacagagggatcatgtactatcttattgaaaggctgaatgaaacgttgcgggaatggcagaaagtacatggcactaaattctatcacaacgtcaatggtgggaagactttgatcagttattcctactatccccagttctggataagcccttcattgagaccaacatttgaaaatgcacttgaacacctcttgcaaagatcacgtcccctagagaatactggccagactgtattggttgttggtggtgttcagtggcttaattccaatcacctgcaaattattcacaaagttttgaagagggaaaatttactcaatatcctagtgatcatcaaaactttgggaattggatttcatctgccagtggatggagtacatttcttaacacagagtgaagtacagaacttatggaaagaaaatttgattattctggatactgcaaaaaaacatggctatgaagtagttgacacattcactataacaatggggcgttacaaagagtttctacaggggaagtgtggatgtcatttccatgaggtagtgaaatcaaagttatccaaagaatataactttattaaaatgaaaagatcaagaaatcatatcatgggaagatatttcagcaatcaaagcaagctacaacaaggcactgtaacaaattttcgatcgccatatcatgtcagaggtccaataaatcaggtttgttctgaaatccttctcagcaggatgtgtgcaaataaaaggactatgtaggctccctgcaggagagctgaatctggagctggagacgagctagtcacccggacaatggtctaggagccaagcgctgcacatcgcacacacttgggatcgaccacacacacttgtgcacaccagcacatgcatgcacaccagtacacacacagttaaataatgataacacttcttacagctttatgaattcaagatgtgaccttgaacaccagtccatttcacagtgaaagatatacctagagaaacgttacttgaagcataattattaaccagaaccactgtgggccaggtatggcattatgataataaagagaaatatagacacttaaaattatgtgaaaaaaaggataatgctctttcatgttgtcttaccatatctataggtacatcaatattgaaaaggagaaaaaccaatgacattccactggcaagtagaagttgtcctttcattctttaccaggagaaaatgtgatgtttatgatggcttaggctttgtgaatctaatgcttatgaaaaacatttcttcctatactttttaaattttattactgaaaggaaaagaacaggaatgttccacaagggaatttgaagagattctgtgagagagatatgaaatattttatagttaaaacaccaatatattcaactttacacttcttgtgtttttcataaacattccctcttgtcttatctgtgtacttcgatgggtaactgcagtctgaattaatgaaatatgtaattttaaagtaagtaacaaaatgtagttcctcatgtattactgtactatgtttcattgatgatattacttaaatcttgtgtttgccattacagccctatgtaacttaaaattacaattatattttatgtaaatattttgcaaaggactatgcattctgaaatgcataggtgctttttcccaccaagcatttgcatatgtccacaaatagtattatgttactagtatctatattttgattttcctgagcaactgtatcaaatccaaatttagattagacaaaaaattattattttaattaaactgtggcatacatataatacatacctaattatagtagtgagaactatttcttttatctctttaggttcaaaatggtgaatttctttattatatgaatgctttgttgtgagataacatcacactgttacaatggattttagaggtttgtcttttttgggtggggtgggaagctgagagggttaattcaatacatggctgaaattaccaaatgtataaatacctcattttcactaccatacaagaaaaaaacacctattttgattgatcagttcttttgtatgaatatccacctcctttaaatactctatttttatatatatttttatatgaagataaacatgaatttatatttaactgtcttaaattatatttacataaatgcaaatatcacttgatataaacaatacaaatctgcatcttacagatgataatttttttagaagaatgatacagaattaactttaaaaataaaacttttctaatatacacttaaatgcaaacatcatttttaaattttcagtgatttttttaatgacataaaacgttaccaatgtgtgcagcctctccatcatgttttaacatactgtatactctatagcagtattacagtcagtatttcatataattttctttagacctaactgttaccatctgactgaggttactctggtatttatctcttcgctgctgaaataataatggattttagaaacaattgtaataatatcattaataaatgtcttactagtaataaaaaaaaaaaaaaaaaaa

SEQ ID NO: 193 - protein, 1026 aa, Homo sapiens
MVCRPVFPCRRRFCPRPFLVGLVVAICLFYQTLTLRGSRKLTAAAPGAVPHTSTETQASRCKKGFSQDKQCFLLSGNAQETRKVKESMETHFGSHGRRAILYRPPFYSKTELQLHQHILTQHGYTVVIAEERLNAGLGPGLLEQGDLGSWDLLICLSSKKAEGTPCISKEVMRQLGLHQKANRLPEIQQPLCRKEGLCQIVRRFPELQLPVSPSVCLDQGMQLKPSTSSHLLKTVKPRVWKPGDWSREQLNETTVLAPHETTFRAEDLSVILKAYVLVTSLTPLRAFIHSTGTVWNPPKKKRFTVKLQTFFETFLRASSPQQAFDIMKEAIGKLLLAAEVFSETSTLGPKTFHRCRFCFQLLTFDIGYGSFMYPVVLQVHEHLNFQDYDNMDFEDQNTEEFLLNDTFNFLFPNESSLSIFSEIFQRLYRSDVFKGENYQKELNQCLSLEEINSIMTFIKELGSLGQFQLLFPSTTPGIQSLMHEFYDVANPVGNPGSVLTQYWSLLNVFEQFQFMNKKTQPHPLEWNSFTEDKNIEKPQVPFDAIENKKAAVPQIKNENKEIHCSDDENTPCHIKQIFTHPHLELNPDFHPKIKDYYCEVPFDVVTVTIGVETPKCLCKVHLYEQAGPSFASYPLGLGMNRISIFVVDESPAHGETLITYKLTIYREDRPSLPLFEAFTACGFVQDCGLLIHPEETCGLQPISSDYIEAILQSELKRCPSGDMKGQWIVPCLSCSDNRTCDWREITWQPHNCQYGVLTKPQLQQCLGGRKILFIGDSTNRGIMYYLIERLNETLREWQKVHGTKFYHNVNGGKTLISYSYYPQFWISPSLRPTFENALEHLLQRSRPLENTGQTVLVVGGVQWLNSNHLQIIHKVLKRENLLNILVIIKTLGIGFHLPVDGVHFLTQSEVQNLWKENLIILDTAKKHGYEVVDTFTITMGRYKEFLQGKCGCHFHEVVKSKLSKEYNFIKMKRSRNHIMGRYFSNQSKLQQGTVTNFRSPYHVRGPINQVCSEILLSRMCANKRTM

SEQ ID NO: 194 - DNA, 840 bp, Homo sapiens
atttagattgagttcatttatttgaaacagactgggccaatgtccacaaagaattcctggtcagcaccaccgatgtccaaaggtgcaatatcaaggaagggcaggcgtgatggcttatttgttttgtattcaatgattgtctttccccattcatttgtctttttagagcagccatctacaagaacagtgtaagtgaacctgctgttgccctcagcaacaagttcaacatcattagagccctgtagaatgacagcctttttcaggttgccagtctcctcatccatgtatgcaatgctgttcttgcagtggtaggtgatgttctgagaggcatagttggccagcaggcgcatgaaggcaagttgggtagccatttccttggaagtcaccccttctacattatattcaaactggctgccagcattgatagtttctcctagccagacgtgtttcttgtccttggagctcctataccagttcttggctgggatgttttcaggttgggcccggatacaggtttcgccagtagagaaatcacagtatactttgatagcatccatagtgcatccttggttagggtcaatccagtagtaaccactgctccactctgggtggctgagtctcaagtcacggcatgtgcgagctgggttctttctagagccttcaggagtaagaaggggtctcaatctggttgttgagagacctcgagtagcatcaacttcatagtccttgggttcgagagaaggtgctgagccaggctggtcagcctgtagaagtctcatcgtaaccaagtcataaccccaccgcttacaccggaagtccggagggcaggggacagggggg

SEQ ID NO: 195 - protein, 1366 aa, Homo sapiens
MLSFVDTRTLLLLAVTLCLATCQSLQEETVRKGPAGDRGPRGERGPPGPPGRDGEDGPTGPPGPPGPPGPPGLGGNFAAQYDGKGVGLGPGPMGLMGPRGPPGAAGAPGPQGFQGPAGEPGEPGQTGPAGARGPAGPPGKAGEDGHPGKPGRPGERGVVGPQGARGFPGTPGLPGFKGIRGHNGLDGLKGQPGAPGVKGEPGAPGENGTPGQTGARGLPGERGRVGAPGPAGARGSDGSVGPVGPAGPIGSAGPPGFPGAPGPKGEIGAVGNAGPAGPAGPRGEVGLPGLSGPVGPPGNPGANGLTGAKGAAGLPGVAGAPGLPGPRGIPGPVGAAGATGARGLVGEPGPAGSKGESGNKGEPGSAGPQGPPGPSGEEGKRGPNGEAGSAGPPGPPGLRGSPGSRGLPGADGRAGVMGPPGSRGASGPAGVRGPNGDAGRPGEPGLMGPRGLPGSPGNIGPAGKEGPVGLPGIDGRPGPIGPAGARGEPGNIGFPGPKGPTGDPGKNGDKGHAGLAGARGAPGPDGNNGAQGPPGPQGVQGGKGEQGPPGPPGFQGLPGPSGPAGEVGKPGERGLHGEFGLPGPAGPRGERGPPGESGAAGPTGPIGSRGPSGPPGPDGNKGEPGVVGAVGTAGPSGPSGLPGERGAAGIPGGKGEKGEPGLRGEIGNPGRDGARGAPGAVGAPGPAGATGDRGEAGAAGPAGPAGPRGSPGERGEVGPAGPNGFAGPAGAAGQPGAKGERGAKGPKGENGVVGPTGPVGAAGPAGPNGPPGPAGSRGDGGPPGMTGFPGAAGRTGPPGPSGISGPPGPPGPAGKEGLRGPRGDQGPVGRTGEVGAVGPPGFAGEKGPSGEAGTAGPPGTPGPQGLLGAPGILGLPGSRGERGLPGVAGAVGEPGPLGIAGPPGARGPPGAVGSPGVNGAPGEAGRDGNPGNDGPPGRDGQPGHKGERGYPGNIGPVGAAGAPGPHGPVGPAGKHGNRGETGPSGPVGPAGAVGPRGPSGPQGIRGDKGEPGEKGPRGLPGLKGHNGLQGLPGIAGHHGDQGAPGSVGPAGPRGPAGPSGPAGKDGRTGHPGTVGPAGIRGPQGHQGPAGPPGPPGPPGPPGVSGGGYDFGYDGDFYRADQPRSAPSLRPKDYEVDATLKSLNNQIETLLTPEGSRKNPARTCRDLRLSHPEWSSGYYWIDPNQGCTMDAIKVYCDFSTGETCIRAQPENIPAKNWYRSSKDKKHVWLGETINAGSQFEYNVEGVTSKEMATQLAFMRLLANYASQNITYHCKNSIAYMDEETGNLKKAVILQGSNDVELVAEGNSRFTYTVLVDGCSKKTNEWGKTIIEYKTNKPSRLPFLDIAPLDIGGADQEFFVDIGPVCFK

SEQ ID NO: 196 - DNA, 561 bp, Homo sapiens
accacagtggtgtccgagaagtcaggcacgtagctcagcggcggccgcggcgcgtgcgtctgtgcctctgcgcgggtctcctggtccttctgccatcatgccgatgttcatcgtaaacaccaacgtgccccgcgcctccgtgccggacgggttcctctccgagctcacccagcagctggcgcaggccaccggcaagcccccccagtacatcgcggtgcacgtggtcccggaccagctcatggccttcggcggctccagcgagccgtgcgcgctctgcagcctgcacagcatcggcaagatcggcggcgcgcagaaccgctcctacagcaagctgctgtgcggcctgctggccgagcgcctgcgcatcagcccggacagggtctacatcaactattacgacatgaacgcggccaatgtgggctggaacaactccaccttcgcctaagagccgcagggacccacgctgtctgcgctggctccacccgggaacccgccgcacgctgtgttctaggcccgcccaccccaaccttctggtggggagaaataaacggtttagagact

SEQ ID NO: 197 - protein, 115 aa, Homo sapiens
MPMFIVNTNVPRASVPDGFLSELTQQLAQATGKPPQYIAVHVVPDQLMAFGGSSEPCALCSLHSIGKIGGAQNRSYSKLLCGLLAERLRISPDRVYINYYDMNAANVGWNNSTFA

SEQ ID NO: 198 - DNA, 1040 bp, Homo sapiens
cgacgagccatggttgctgggagcgacgcggggcgggccctgggggtcctcagcgtggtctgcctgctgcactgctttggtttcatcagctgtttttcccaacaaatatatggtgttgtgtatgggaatgtaactttccatgtaccaagcaatgtgcctttaaaagaggtcctatggaaaaaacaaaaggataaagttgcagaactggaaaattctgaattcagagctttctcatcttttaaaaatagggtttatttagacactgtgtcaggtagcctcactatctacaacttaacatcatcagatgaagatgagtatgaaatggaatcgccaaatattactgataccatgaagttctttctttatgtgcttgagtctcttccatctcccacactaacttgtgcattgactaatggaagcattgaagtccaatgcatgataccagagcattacaacagccatcgaggacttataatgtactcatgggattgtcctatggagcaatgtaaacgtaactcaaccagtatatattttaagatggaaaatgatcttccacaaaaaatacagtgtactcttagcaatccattatttaatacaacatcatcaatcattttgacaacctgtatcccaagcagcggtcattcaagacacagatatgcacttatacccataccattagcagtaattacaacatgtattgtgctgtatatgaatggtattctgaaatgtgacagaaaaccagacagaaccaactccaattgattggtaacagaagatgaagacaacagcataactaaattattttaaaaactaaaaagccatctgatttctcatttgagtattacaatttttgaacaactgttggaaatgtaacttgaagcagctgctttaagaagaaatacccactaacaaagaacaagcattagttttggctgtcatcaacttattatatgactaggtgcttgctttttttgtcagtaaattgtttttactgatgatgtagatacttttgtaaataaatgtaaatatgtacacaagtg

SEQ ID NO: 199 - protein, 250 aa, Homo sapiens
MVAGSDAGRALGVLSVVCLLHCFGFISCFSQQIYGVVYGNVTFHVPSNVPLKEVLWKKQKDKVAELENSEFRAFSSFKNRVYLDTVSGSLTIYNLTSSDEDEYEMESPNITDTMKFFLYVLESLPSPTLTCALTNGSIEVQCMIPEHYNSHRGLIMYSWDCPMEQCKRNSTSIYFKMENDLPQKIQCTLSNPLFNTTSSIILTTCIPSSGHSRHRYALIPIPLAVITTCIVLYMNGILKCDRKPDRTNSN

SEQ ID NO: 200 - DNA, 2504 bp, Homo sapiens
tcccggcgggctgtgcggcccggctctccggcggcagcgagtgccacgtcccaagtgctacgcggaggattagagcaggcggtgcgctgggggcgggagcagcgcggagcccggctcggccacaccgatcgcccgccgccatgggctcctcgcaaagcgtcgagatcccgggcgggggcaccgagggctaccacgttctgcgggtacaagaaaattccccaggacacagagctggtttggagcctttctttgattttattgtttctattaatggttcaagattaaataaagacaatgacactcttaaggatctgctgaaagcaaacgttgaaaagcctgtaaagatgcttatctatagcagcaaaacattggaactgcgagagacctcagtcacaccaagtaacctgtggggcggccagggcttattgggagtgagcattcgtttctgcagctttgatggggcaaatgaaaatgtttggcatgtgctggaggtggaatcaaattctcctgcagcactggcaggtcttagaccacacagtgattatataattggagcagatacagtcatgaatgagtctgaagatctattcagccttatcgaaacacatgaagcaaaaccattgaaactgtatgtgtacaacacagacactgataactgtcgagaagtgattattacaccaaattctgcatggggtggagaaggcagcctaggatgtggcattggatatggttatttgcatcgaatacctacacgcccatttgaggaaggaaagaaaatttctcttccaggacaaatggctggtacacctattacacctcttaaagatgggtttacagaggtccagctgtcctcagttaatcccccgtctttgtcaccaccaggaactacaggaattgaacagagtctgactggactttctattagctcaactccaccagctgtcagtagtgttctcagtacaggtgtaccaacagtaccgttattgccaccacaagtaaaccagtccctcacttctgtgccaccaatgaatccagctactacattaccaggtctgatgcctttaccagcaggactgcccaacctccccaacctcaacctcaacctcccagcaccacacatcatgccaggggttggcttaccagaacttgtaaacccaggtctgccacctcttccttccatgcctccccgaaacttacctggcattgcacctctccccctgccatccgagttcctcccgtcattccccttggttccagagagctcttctgcagcaagctcaggagagctgctgtcttccctcccgcccaccagcaacgcaccctctgaccctgccacaactactgcaaaggcagacgctgcctcctcactcactgtggatgtgacgccccccactgccaaggcccccaccaccgttgaggacagagtcggcgactccaccccagtcagcgagaagcctgtttctgcggctgtggatgccaatgcttctgagtcaccttaactttgaaccattctttggaattggcgtggtatatttaaccacgggagcgtgtctggaaacgcaaactatcattaatttcatactagtttgtaccgtatctgtaggcatcctgtaaataattccaaggggaaaactaaacgaggacgtgggttgtatcctgccaggttgagtggggctcacacgctagggtgagatgtcagaaagcgcttgtattttaaacaaccaaaaagaattgtaagggtggcttgctgccaggcttgcactgccgttcctgggggtgtgcatcttcgggaaaggtggtggcggggcgtccactaggtttcctgtcccctgctgctccttccgtaagaaaatgaaatattctatgcctaatactcacacgcaacatttcttgtactttgtaagtcgtttgcgagaatgcagaccacctcactaaactgtaaacggtaaagagatttttacttttggtctccgtgagtcgcatctctactaaggtttacacaggaattccacctgaagacttgtgttaaagttctacagcgcgcactgttaactgaacgtctttttcttcagcctatacgcggatccttgttttgagctctcagaatcactcagacaacattttgtaactgctgctgttgctttctacatacaccttataaagtgacatttcaaaagaaataaggtgccacagttttaaaccagaaggtggcactctgtggctccttgtagtattatagctatactgggaaagcatagatacagcaataaagtacagtaattttactttttttcttgtgttacatctaaattacaacccttaattgccacgtgtgcacttactactctccagtatgtcttattactctccagtatgtcacgcatctttaacttttcacgtcctatgtttgctttctcccatttttaagagatggtaagttaactggaattgatttactgaatgaaattaaatgcagatatccctgtttttgaaataagaaaaaa

SEQ ID NO: 201 - protein, 452 aa, Homo sapiens
MGSSQSVEIPGGGTEGYHVLRVQENSPGHRAGLEPFFDFIVSINGSRLNKDNDTLKDLLKANVEKPVKMLIYSSKTLELRETSVTPSNLWGGQGLLGVSIRFCSFDGANENVWHVLEVESNSPAALAGLRPHSDYIIGADTVMNESEDLFSLIETHEAKPLKLYVYNTDTDNCREVIITPNSAWGGEGSLGCGIGYGYLHRIPTRPFEEGKKISLPGQMAGTPITPLKDGFTEVQLSSVNPPSLSPPGTTGIEQSLTGLSISSTPPAVSSVLSTGVPTVPLLPPQVNQSLTSVPPMNPATTLPGLMPLPAGLPNLPNLNLNLPAPHIMPGVGLPELVNPGLPPLPSMPPRNLPGIAPLPLPSEFLPSFPLVPESSSAASSGELLSSLPPTSNAPSDPATTTAKADAASSLTVDVTPPTAKAPTTVEDRVGDSTPVSEKPVSAAVDANASESP

SEQ ID NO: 202 - DNA, 1420 bp, Homo sapiens
gtcagcctacatttttttaagtaaggagtcctgatgttcaactattaaatctttattataggttatagactggactttaaaggcatagctgccttaaatgtgggtaatggttgataaatgtcgctaccatcagaggtcgcttcacaaggtgtctaattcagaatcgaagatctctagcggtcttctactcagtcgactgcagagacgaccgcggtaggtttttcaacccggactcaacaaagaagccctcatagcacagccttgacgtcactcaaagacaggccccaatcccgactgctagagcagaggcccgcccctcgacctccgtgagtggccccgccccgccctagggggcggggcgatgccgaactgcggcgggctggctcagtaaagcggaggcagcgggggaagatggcggcggccgttccacagcgggcgtggaccgtggagcagctgcgcagtgagcagctgcccaagaaggacattatcaagtttctgcaggaacacggttcagattcgtttcttgcagaacataaattattaggaaacattaaaaatgtggccaagacagctaacaaggaccacttggttacagcctataaccatctttttgaaactaagcgttttaagggtactgaaagtataagtaaagtgtctgagcaagtaaaaaatgtgaagcttaatgaagataaacccaaagaaaccaagtctgaagagaccctggatgagggtccaccaaaatatactaaatctgttctgaaaaagggagataaaaccaactttcccaaaaagggagatgttgttcactgctggtatacaggaacactacaagatgggactgtttttgatactaatattcaaacaagtgcaaagaagaagaaaaatgccaagcctttaagttttaaggtcggagtaggcaaagttatcagaggatgggatgaagctctcttgactatgagtaaaggagaaaaggctcgactggagattgaaccagaatgggcttacggaaagaaaggacagcctgatgccaaaattccaccaaatgcaaaactcacttttgaagtggaattagtggatattgattgaaatagcagtgcttcagctctaaggatattagcaacaatgataaaacttggccttgaagaaatttacacaactagttagaacttgttactattgtaaaggaagagtcaactggaaaattcaaggagttaataaaatttgtttacttggtcccagcttttgagagataaatcccttatgaatccctggtctaaaatactttcctacagctgtgtaaaatactggtcaaggagaactttttccttttacctcatgttgtaaacttaagtggctcaataaaaattgatccactgtcaaaaaaaaaaaaaaaaaaaaaaaaaaaaaaaaaaaaaaaaaa

SEQ ID NO: 203 - protein, 224 aa, Homo sapiens
MAAAVPQRAWTVEQLRSEQLPKKDIIKFLQEHGSDSFLAEHKLLGNIKNVAKTANKDHLVTAYNHLFETKRFKGTESISKVSEQVKNVKLNEDKPKETKSEETLDEGPPKYTKSVLKKGDKTNFPKKGDVVHCWYTGTLQDGTVFDTNIQTSAKKKKNAKPLSFKVGVGKVIRGWDEALLTMSKGEKARLEIEPEWAYGKKGQPDAKIPPNAKLTFEVELVDID

SEQ ID NO: 204 - DNA, 2966 bp, Homo sapiens
gtttgaatgagactcgtcgcaccgaagccgccgccaccaccgcgcctccgcctcggccgccgccgcagctgctcctggtccccgtccctttgccgccctcgtcaggcccagctctcctgcgccgccgcctcccgccgcgccccgccatgccgctctactccgttactgtaaaatggggaaaggagaaatttgaaggtgtagaattgaatacagatgaacctccaatggtattcaaggctcagctgtttgcgttgactggagtccagcctgccagacagaaagttatggtgaaaggaggaacgctaaaggatgatgattggggaaacatcaaaataaaaaatggaatgactctactaatgatggggtcagcagatgctcttccagaagaaccctcagccaaaactgtcttcgtagaagacatgacagaagaacagttagcatctgctatggagttaccatgtggattgacaaaccttggtaacacttgttacatgaatgccacagttcagtgtattcgttctgtgcctgaactcaaagatgcccttaaaaggtatgcaggtgccttgagagcttcaggggaaatggcttcagcgcagtatattactgcagcccttagagatttgtttgattccatggataaaacttcttccagtattccacctattattctactgcagtttttgcacatggctttcccacagtttgccgagaaaggtgaacaaggacagtatcttcaacaggatgctaatgaatgttggatacaaatgatgcgagtattgcaacagaaattggaagcaatagaggatgattctgttaaagagacagactcctcatctgcatcggcagcgacaccttctaaaaagaaaagtttaatcgatcagttcttcggtgttgagtttgaaactaccatgaaatgtacagaatctgaagaagaagaagtcaccaaaggaaaggaaaatcaacttcagcttagctgttttatcaatcaggaagtcaagtatctttttacaggacttaaattgcgacttcaggaagaaatcaccaaacagtctccaacgttgcaaagaaatgccttgtatatcaaatcttccaagatcagccggctgcctgcttacttgaccattcagatggttcgatttttttataaagagaaggaatctgtgaatgccaaagttcttaaggatgttaaatttcctcttatgttggatatgtatgaactgtgtacaccagaacttcaagagaaaatggtgtcttttcgatccaaattcaaggatctagaagataaaaaagtgaatcagcagccaaatacaagtgacaaaaagagtagtccccagaaagaagttaagtatgaacccttttcttttgctgatgatattggctccaataattgtggatactatgacttacaagcagtactaacacaccagggaaggtctagttcttcaggtcattatgtatcatgggtgaaaaggaaacaagatgaatggattaagtttgatgatgacaaagtcagcatcgtaacaccagaagatatcttacggctttctggtggtggagactggcatatcgcttacgttctactctatgggcctcgcagagttgaaataatggaagaggaaagtgaacagtaatcttcattttagtatttatgcttagatgtgaaaataaatgttatttgttgatcatttctataatccagagctttagaggaagacacataggtgggtttatgtttcacctcatttggaacaaaagaggacagaagcagaccactctgtgcaccaacctaaaaaattacagagaagagaaaattatctttggattgtgctgccctatataaaggtggcagaaagacatttttaaaaagcttattatttcttgcattattttaaaaagttcagagttgaaatgcctttcaaccatttccttctgtggtcatttttcttgctgcctttttcacccaagattcagcagtcagatgtttactgcacacctattacctattatttgctgttcttgcatggttcaaaccaccattctgtagccacccatcctttgccttatctaacaaacatttttccaggaaggtggaaaaggaagtgttgctctcattgtgtgactcagtgctgctgtccatcccatggaaacatgggcacaatcaagtatttgtccagcctattgcaggcttttcctgactttaaaataaattgtgatcaataatagtacctttgattatacatttattattgtgtctctctctgatgtactgtggattgtacatttaactttggaatggctttgtaataatcagtcttaagaaaatgttgacaagctctggttgcttatttttagaaaatgaggacatttaataataataaaaaaaaagggattaatagcttttgacctcaagtcttttgtcttctgagtgttggagcttggctgaagacatgtttaatactgtacaatttctgaagatggttattaacactgtgctgttaagcatccatttaaaaatatttgttatcttctttgcctgcctgtattttaaaaagaaatacaaagttgtaaaagtaatggatttctttggatgctgaatgcagtgatgttatcagtcagattctttccttggctcagttgtgtttgtatttcctttcttaattccccaaatcttggctgggcacggtggctcacgcctgtaatcccagcactttgggaggctgaggcaggtggttcactggaggttgagttcgagaccagcctggccacatggtgaaaccctgtctctactaaagatataaaaattagctggatgtggtggtgcacacctgtgatcccagctacttgggaggctgaggtgggagaattgcttgaacctggaaggcagaagttgcagtgagctgagatcacaccactgcactccagcctgggtgacagagagactctgtctcaaaaaaaaaaaaaaaaaa

SEQ ID NO: 205 - protein, 494 aa, Homo sapiens
MPLYSVTVKWGKEKFEGVELNTDEPPMVFKAQLFALTGVQPARQKVMVKGGTLKDDDWGNIKIKNGMTLLMMGSADALPEEPSAKTVFVEDMTEEQLASAMELPCGLTNLGNTCYMNATVQCIRSVPELKDALKRYAGALRASGEMASAQYITAALRDLFDSMDKTSSSIPPIILLQFLHMAFPQFAEKGEQGQYLQQDANECWIQMMRVLQQKLEAIEDDSVKETDSSSASAATPSKKKSLIDQFFGVEFETTMKCTESEEEEVTKGKENQLQLSCFINQEVKYLFTGLKLRLQEEITKQSPTLQRNALYIKSSKISRLPAYLTIQMVRFFYKEKESVNAKVLKDVKFPLMLDMYELCTPELQEKMVSFRSKFKDLEDKKVNQQPNTSDKKSSPQKEVKYEPFSFADDIGSNNCGYYDLQAVLTHQGRSSSSGHYVSWVKRKQDEWIKFDDDKVSIVTPEDILRLSGGGDWHIAYVLLYGPRRVEIMEEESEQ

SEQ ID NO: 206 - DNA, 1134 bp, Homo sapiens
gacgtgtctttcaggaagaggagctggtgagaagacagcgaaatggcgcctccggcccccggcccggcctccggcggctccggggaggtagacgagctgttcgacgtaaagaacgccttctacatcggcagctaccagcagtgcataaacgaggcgcagcgggtgaagctatcaagcccagagagagacgtggagagggacgtcttcctgtatagagcgtacctggcgcagaggaagttcggtgtggtcctggatgagatcaagccctcctcggcccctgagctccaggccgtgcgcatgtttgctgactacctcgcccacgagagtcggagggacagcatcgtggccgagctggaccgagagatgagcaggagcgtggacgtgaccaacaccaccttcctgctcatggccgcctccatctatctccacgaccagaacccggatgccgccctgcgtgcgctgcaccagggggacagcctggagtgcacagccatgacagtgcagatcctgctgaagctggaccgcctggacctcgcccggaaggagctgaagagaatgcaggacctggacgaggatgccaccctcacccagctcgccactgcctgggtcagcctggccacgggtggtgagaagctgcaggatgcctactacatcttccaggagatggctgacaagtgctcgcccaccctgctgctgctcaatgggcaggcggcctgccacatggcccagggccgctgggaggccgctgagggcctgctgcaggaggcgctagacaaggatagtggctacccagagacgctggtcaacctcatcgtcctgtcccagcacctgggcaagccccctgaggtgacaaaccgatacctgtcccagctgaaggatgcccacaggtcccatcccttcatcaaggagtaccaggccaaggagaacgactttgacaggctggtgctacagtacgctcccagcgcctgaggctggcccagagctgtcaggaccatgaagccaggacagaggccaggagccagccctgcagccctccccacccggcatccacctgcatcccctctgggggcaggagcccacccccagcacccccatctgttaataaatatctcaactccagggtgttccacctga

SEQ ID NO: 207 - protein, 308 aa, Homo sapiens
MAPPAPGPASGGSGEVDELFDVKNAFYIGSYQQCINEAQRVKLSSPERDVERDVFLYRAYLAQRKFGVVLDEIKPSSAPELQAVRMFADYLAHESRRDSIVAELDREMSRSVDVTNTTFLLMAASIYLHDQNPDAALRALHQGDSLECTAMTVQILLKLDRLDLARKELKRMQDLDEDATLTQLATAWVSLATGGEKLQDAYYIFQEMADKCSPTLLLLNGQAACHMAQGRWEAAEGLLQEALDKDSGYPETLVNLIVLSQHLGKPPEVTNRYLSQLKDAHRSHPFIKEYQAKENDFDRLVLQYAPSA

SEQ ID NO: 208 - DNA, 2930 bp, Homo sapiens
ggggttgggacagcgtcttcgctgctgctggatagtcgtgttttcggggatcgaggatactcaccagaaaccgaaaatgccgaaaccaatcaatgtccgagttaccaccatggatgcagagctggagtttgcaatccagccaaatacaactggaaaacagctttttgatcaggtggtaaagactatcggcctccgggaagtgtggtactttggcctccactatgtggataataaaggatttcctacctggctgaagctggataagaaggtgtctgcccaggaggtcaggaaggagaatcccctccagttcaagttccgggccaagttctaccctgaagatgtggctgaggagctcatccaggacatcacccagaaacttttcttcctccaagtgaaggaaggaatccttagcgatgagatctactgcccccctgagactgccgtgctcttggggtcctacgctgtgcaggccaagtttggggactacaacaaagaagtgcacaagtctgggtacctcagctctgagcggctgatccctcaaagagtgatggaccagcacaaacttaccagggaccagtgggaggaccggatccaggtgtggcatgcggaacaccgtgggatgctcaaagataatgctatgttggaatacctgaagattgctcaggacctggaaatgtatggaatcaactatttcgagataaaaaacaagaaaggaacagacctttggcttggagttgatgcccttggactgaatatttatgagaaagatgataagttaaccccaaagattggctttccttggagtgaaatcaggaacatctctttcaatgacaaaaagtttgtcattaaacccatcgacaagaaggcacctgactttgtgttttatgccccacgtctgagaatcaacaagcggatcctgcagctctgcatgggcaaccatgagttgtatatgcgccgcaggaagcctgacaccatcgaggtgcagcagatgaaggcccaggcccgggaggagaagcatcagaagcagctggagcggcaacagctggaaacagagaagaaaaggagagaaaccgtggagagagagaaagagcagatgatgcgcgagaaggaggagttgatgctgcggctgcaggactatgaggagaagacaaagaaggcagagagagagctctcggagcagattcagagggccctgcagctggaggaggagaggaagcgggcacaggaggaggccgagcgcctagaggctgaccgtatggctgcactgcgggctaaggaggagctggagagacaggcggtggatcagataaagagccaggagcagctggctgcggagcttgcagaatacactgccaagattgccctcctggaagaggcgcggaggcgcaaggaggatgaagttgaagagtggcagcacagggccaaagaagcccaggatgacctggtgaagaccaaggaggagctgcacctggtgatgacagcacccccgcccccaccaccccccgtgtacgagccggtgagctaccatgtccaggagagcttgcaggatgagggcgcagagcccacgggctacagcgcggagctgtctagtgagggcatccgggatgaccgcaatgaggagaagcgcatcactgaggcagagaagaacgagcgtgtgcagcggcagctcgtgacgctgagcagcgagctgtcccaggcccgagatgagaataagaggacccacaatgacatcatccacaacgagaacatgaggcaaggccgggacaagtacaagacgctgcggcagatccggcagggcaacaccaagcagcgcatcgacgagttcgaggccctgtaacagccaggccaggaccaagggcagaggggtgctcatagcgggcgctgccagccccgccacgcttgtctttagtgctccaagtctaggaactccctcagatcccagttcccttagaaagcagttacccaacagaaacattctgggctgggaaccagggaggcgccctggtttgttttccccagttgtaatagtgccaagcaggcctgattctcgcgattattctcgaatcacctcctgtgttgtgctgggagcaggactgattgaattacggaaaatgcctgtaaagtctgagtaagaaacttcatgctggcctgtgtgatacaagagtcagcatcattaaaggaaacgtggcaggacttccatctgtgccatacttgttctgtattcgaaatgagctcaaattgattttttaatttctatgaaggatccatctttgtatatttacatgcttagaggggtgaaaattattttggaaattgagtctgaagcactctcgcacacacagtgattccctcctcccgtcactccacgcagctggcagagagcacagtgatcaccagcgtgagtggtggaggaggacacttggatttttttttttgtttttttttttttgcttaacagttttagaatacattgtacttatacaccttattaatgatcagctatatactatttatatacaagtgataatacagatttgtaacattagttttaaaaagggaaagttttgttctgtatattttgttaccttttacagaataaaagaattacatatgaaaaaccctctaaaccatggcacttgatgtgatgtggcaggagggcagtggtggagctggacctgcctgctgcagtcacgtgtaaacaggattattattagtgttttatgcatgtaatggactatgcacacttttaattttgtcagattcacacatgccactatgagctttcagactccagctgtgaagagactctgtttgcttgtgtttgtttgtttgcagtctctctctgccatggccttggcaggctgctggaaggcagcttgtggaggccgttggttccgcccactcattccttctcgtgcactgctttctcc

SEQ ID NO: 209 - protein, 575 aa, Homo sapiens
MDAELEFAIQPNTTGKQLFDQVVKTIGLREVWYFGLHYVDNKGFPTWLKLDKKVSAQEVRKENPLQFKFRAKFYPEDVAEELIQDITQKLFFLQVKEGILSDEIYCPPETAVLLGSYAVQAKFGDYNKEVHKSGYLSSERLIPQRVMDQHKLTRDQWEDRIQVWHAEHRGMLKDNAMLEYLKIAQDLEMYGINYFEIKNKKGTDLWLGVDALGLNIYEKDDKLTPKIGFPWSEIRNISFNDKKFVIKPIDKKAPDFVFYAPRLRINKRILQLCMGNHELYMRRRKPDTIEVQQMKAQAREEKHQKQLERQQLETEKKRRETVEREKEQMMREKEELMLRLQDYEEKTKKAERELSEQIQRALQLEEERKRAQEEAERLEADRMAALRAKEELERQAVDQIKSQEQLAAELAEYTAKIALLEEARRRKEDEVEEWQHRAKEAQDDLVKTKEELHLVMTAPPPPPPPVYEPVSYHVQESLQDEGAEPTGYSAELSSEGIRDDRNEEKRITEAEKNERVQRQLVTLSSELSQARDENKRTHNDIIHNENMRQGRDKYKTLRQIRQGNTKQRIDEFEAL

SEQ ID NO: 210 - DNA, 925 bp, Homo sapiens
ttttttctgctaccgtgactaagatggaagcgtttttggggtcgcggtccggactttgggcggggggtccggccccaggacagttttaccgcattccgtccactcccgattccttcatggatccggcgtctgcactttacagaggtccaatcacgcggacccagaaccccatggtgaccgggacctcagtcctcggcgttaagttcgagggcggagtggtgattgccgcagacatgctgggatcctacggctccttggctcgtttccgcaacatctctcgcattatgcgagtcaacaacagtaccatgctgggtgcctctggcgactacgctgatttccagtatttgaagcaagttctcggccagatggtgattgatgaggagcttctgggagatggacacagctatagtcctagagctattcattcatggctgaccagggccatgtacagccggcgctcgaagatgaaccctttgtggaacaccatggtcatcggaggctatgctgatggagagagcttcctcggttatgtggacatgcttggtgtagcctatgaagccccttcgctggccactggttatggtgcatacttggctcagcctctgctgcgagaagttctggagaagcagccagtgctaagccagaccgaggcccgcgacttagtagaacgctgcatgcgagtgctgtactaccgagatgcccgttcttacaaccggtttcaaatcgccactgtcaccgaaaaaggtgttgaaatagagggaccattgtctacagagaccaactgggatattgcccacatgatcagtggctttgaatgaaatacagatgcattatccagaactgaagttgccctacttttaactttgaacttggctagttcaaagatagactcttcttttgtaaagtaaataaattcttcaaaatg

SEQ ID NO: 211 - protein, 264 aa, Homo sapiens
MEAFLGSRSGLWAGGPAPGQFYRIPSTPDSFMDPASALYRGPITRTQNPMVTGTSVLGVKFEGGVVIAADMLGSYGSLARFRNISRIMRVNNSTMLGASGDYADFQYLKQVLGQMVIDEELLGDGHSYSPRAIHSWLTRAMYSRRSKMNPLWNTMVIGGYADGESFLGYVDMLGVAYEAPSLATGYGAYLAQPLLREVLEKQPVLSQTEARDLVERCMRVLYYRDARSYNRFQIATVTEKGVEIEGPLSTETNWDIAHMISGFE

SEQ ID NO: 212 - DNA, 351 bp, Homo sapiens
ctttcactacactacaggatatgatctccatgtagtccatataaacctgcagagtgattttccagagtgctcgatactgttaattacatctccattagggctgaaaagaatgacctacgtttctgtatacagctgtgttgcttttgatgttgtgttactgtacacagaagtgtgtgcactgaggctctgcgtgtggtccgtatggaaagcctggtagccctgcgagttaagtactgcttccattcattgtttacgctggaatttttctccccatggaatgtaagtaaaacttaagtgtttgtcatcaataaatggtaatactaaaaaaaaaaaaaaaaaaaaaaaaaaaag

SEQ ID NO: 213 - protein, 496 aa, Homo sapiens
MKLGKKPMYKPVDPYSRMQSTYNYNMRGGAYPPRYFYPFPVPPLLYQVELSVGGQQFNGKGKTRQAAKHDAAAKALRILQNEPLPERLEVNGRESEEENLNKSEISQVFEIALKRNLPVNFEVARESGPPHMKNFVTKVSVGEFVGEGEGKSKKISKKNAAIAVLEELKKLPPLPAVERVKPRIKKKTKPIVKPQTSPEYGQGINPISRLAQIQQAKKEKEPEYTLLTERGLPRRREFVMQVKVGNHTAEGTGTNKKVAKRNAAENMLEILGFKVPQRQPTKPALKSEEKTPIKKPGDGRKVTFFEPGSGDENGTSNKEDEFRMPYLSHQQLPAGILPMVPEVAQAVGVSQGHHTKDFTRAAPNPAKATVTAMIARELLYGGTSPTAETILKNNISSGHVPHGPLTRPSEQLDYLSRVQGFQVEYKDFPKNNKNEFVSLINCSSQPPLISHGIGKDVESCHDMAALNILKLLSELDQQSTEMPRTGNGPMSVCGRC

SEQ ID NO: 214 - DNA, 3477 bp, Homo sapiens
ctgtgtgtaggagggatttcggcctgagagcgggccgaggagattggcgacggtgtcgcccgtgttttcgttggcgggtgcctgggctggtgggaacagccgcccgaaggaagcaccatgatttcggccgcgcagttgttggatgagttaatgggccgggaccgaaacctagccccggacgagaagcgcagcaacgtgcggtgggaccacgagagcgtttgtaaatattatctctgtggtttttgtcctgcggaattgttcacaaatacacgttctgatcttggtccgtgtgaaaaaattcatgatgaaaatctacgaaaacagtatgagaagagctctcgtttcatgaaagttggctatgagagagattttttgcgatacttacagagcttacttgcagaagtagaacgtaggatcagacgaggccatgctcgtttggcattatctcaaaaccagcagtcttctggggccgctggcccaacaggcaaaaatgaagaaaaaattcaggttctaacagacaaaattgatgtacttctgcaacagattgaagaattagggtctgaaggaaaagtagaagaagcccaggggatgatgaaattagttgagcaattaaaagaagagagagaactgctaaggtccacaacgtcgacaattgaaagctttgctgcacaagaaaaacaaatggaagtttgtgaagtatgtggagcctttttaatagtaggagatgcccagtcccgggtagatgaccatttgatgggaaaacaacacatgggctatgccaaaattaaagctactgtagaagaattaaaagaaaagttaaggaaaagaaccgaagaacctgatcgtgatgagcgtctaaaaaaggagaagcaagaaagagaagaaagagaaaaagaacgggagagagaaagggaagaaagagaaaggaaaagacgaagggaagaggaagaaagagaaaaagaaagggctcgtgacagagaaagaagaaagagaagtcgttcacgaagtagacactcaagccgaacatcagacagaagatgcagcaggtctcgggaccacaaaaggtcacgaagtagagaaagaaggcggagcagaagtagagatcgacgaagaagcagaagccatgatcgatcagaaagaaaacacagatctcgaagtcgggatcgaagaagatcaaaaagccgggatcgaaagtcatataagcacaggagcaaaagtcgggacagagaacaagatagaaaatccaaggagaaagaaaagaggggatctgatgataaaaaaagtagtgtgaagtccggtagtcgagaaaagcagagtgaagacacaaacactgaatcgaaggaaagtgatactaagaatgaggtcaatgggaccagtgaagacattaaatctgaaggtgacactcagtccaattaaaactgatctgataagacctcagatcagacagaggtaagtgtattgtttctcactttgattagggctttttgttactgtttgacagtgcagcgtaagtatgcacagatgaagatggaactaagccgagtaagaagacatacaaaagcctcttctgaaggaaaagacagtgtagtcctgcaaaacattttgaggtacattgttttgtctcagctattttgtagcagactcgtgcccccattagtgtgcctctttggaaattatcgcccacatttgtaatatagtcgccattgaaaagttaattatcctttttttagggattttgatgtcatttcttttttttttttaataaaaaggttgaactgtttttttttttctttttggtattaagtccatcttgtgttggtacattggcagagacatatgctttaaaaacttaaatatttcggaggcacatgttggactactttgttttaattaaactgctagtatttctttgtcaaggatgtttctagttttttgctttattgccttgcattctaatgcagtttgttctgtaactcgagagccagtagcattggattgatggaagtgtagggtttatgaattattgcagctgactaccatacctcacacagcgttggtgttgtgagcggcccatgaaaagccaaattaaaaatcaaggattcagtcaaactaagcaggtactcatgccaggtactcctttctctacccacatccatgtttgaatgctattgcctgtgatctttacgcttaactgttgtgtatcttttttgttctttacaagaagtgcagaggggttttttgtgtattgcgtgaaaacttataaaacaaatgttaacagaatggaattttttttcaactgtatgtagggctgcagtggtggccagaattagatatctttaaagaattttaaatacaataaacacttcatattattcgccttgttacactcaatgcaattctcaagtctataagaggtatgtgcttaatatttcctactgtgtaggagaatttgcagtcagccataggtatgtaggaatagtcactcactggctgatacatttaaagcagcagtgtgaatagcaaggacagacaccttcaatttgtgaaatcaaagaactgatgcactatatagaacgaatttgggtttttaaagaaatattaaaagttaggtactgtaagtgttcttaaaacctgtaaacttcattctgtgggctagtggtgtgggacaaaatattcctaatgaaaggaagtaccaattagttgatttgttggtggcattccccttttgggaaagcaatgtaaggttatgtctgtgtatgtcattcacacttaggcaagcatacacaggcacatggctttaagaaccacactgatgccttgataattaaaaagaatacaagcattccatgtacacatgttaattagcagttagtgactgggccaacactttctcataaaaattggccttttacatgttgtctaattatcatttttccccaaattttgcgttgtaggactactgttcgaagatttttggaagaatactgagaacggcataaagtgaagatcgacatttaaaaaatgaggtgaaagaaagctatagtggcatagaaaaagtataaagctcagttagtttttttattattattattattaaaagttaattcaggactgatgtgacctaccagatttcagaacatgtgttaatagtatatatgccactgaaaacttaggtcctgtatcatacttttttctttaagactttttaagaaatattacttaaacatgtggcttgctcagtgtttaattgcaagttttcaatcttggactttgaaaacaggattaaacgttagtattcgtgtgaatcagactaagtgggatttcatttttacaactctgctctacttagcctttggatttagaagtaaaaataaagtatctctgactttctgttacaaagttgattgtctctgtcattgaaaagttttagtattaatctttttctaataaagttattgactctgaaaaaaaaaaaaa

SEQ ID NO: 215 - protein, 432 aa, Homo sapiens
MISAAQLLDELMGRDRNLAPDEKRSNVRWDHESVCKYYLCGFCPAELFTNTRSDLGPCEKIHDENLRKQYEKSSRFMKVGYERDFLRYLQSLLAEVERRIRRGHARLALSQNQQSSGAAGPTGKNEEKIQVLTDKIDVLLQQIEELGSEGKVEEAQGMMKLVEQLKEERELLRSTTSTIESFAAQEKQMEVCEVCGAFLIVGDAQSRVDDHLMGKQHMGYAKIKATVEELKEKLRKRTEEPDRDERLKKEKQEREEREKEREREREERERKRRREEEEREKERARDRERRKRSRSRSRHSSRTSDRRCSRSRDHKRSRSRERRRSRSRDRRRSRSHDRSERKHRSRSRDRRRSKSRDRKSYKHRSKSRDREQDRKSKEKEKRGSDDKKSSVKSGSREKQSEDTNTESKESDTKNEVNGTSEDIKSEGDTQSN

SEQ ID NO: 216 - DNA, 1123 bp, Homo sapiens
ccatcatggaagcaatgtggctcctgtgtgtggcgttggcggtcttggcatggggcttcctctgggtttgggactcctcagaacgaatgaagagtcgggagcagggaggacggctgggagccgaaagccggaccctgctggtcatagcgcaccctgacgatgaagccatgttttttgctcccacagtgctaggcttggcccgcctaaggcactgggtgtacctgctttgcttctctgcaggaaattactacaatcaaggagagactcgtaagaaagaacttttgcagagctgtgatgttttggggattccactctccagtgtaatgattattgacaacagggatttcccagatgacccaggcatgcagtgggacacagagcacgtggccagagtcctccttcagcacatagaagtgaatggcatcaatctggtggtgactttcgatgcagggggagtaagtggccacagcaatcacattgctctgtatgcagctgtgagggccctgcactcagaagggaagttacctaaagggtgctctgtgctcacgcttcagtctgtgaatgtgctgcgcaagtacatctcccttctggatctgcccttgtctctgcttcatacgcaggatgtcctcttcgtgctcaacagcaaagaagtggcacaggccaagaaagccatgtcctgccaccgcagccagctcctctggttccgccgcctctacattatcttctcccggtacatgagaatcaactcactgagcttcctctgaagccttgaagggttttcagatccaaggaacaaaggggaaaatagacaaaggagtgcagaggacctggcctggcactggcttatttacctgagctcaaggagatccccgctggagcagcctctgcaaaagggagcccatgtaggccaggggctgtccaaactccagcttcttcccctgggaaaaaacccaaagaaccaaaaacaaaccaccccaaggataataatagctacactgctagcttctcaagttcttgtgaaaaacaatttacataatgacacagtagatgtggaacacctagcccagtgcctgggcaggtccctattatcataaatgaacataaaagtgctctaaaaacactc

SEQ ID NO: 217 - protein, 252 aa, Homo sapiens
MEAMWLLCVALAVLAWGFLWVWDSSERMKSREQGGRLGAESRTLLVIAHPDDEAMFFAPTVLGLARLRHWVYLLCFSAGNYYNQGETRKKELLQSCDVLGIPLSSVMIIDNRDFPDDPGMQWDTEHVARVLLQHIEVNGINLVVTFDAGGVSGHSNHIALYAAVRALHSEGKLPKGCSVLTLQSVNVLRKYISLLDLPLSLLHTQDVLFVLNSKEVAQAKKAMSCHRSQLLWFRRLYIIFSRYMRINSLSFL

SEQ ID NO: 218 - DNA, 3262 bp, Homo sapiens
agggggcgaaggcggcggtggtgaggaagatactttggttagtgaccacatcgcagcatgttgagtcaagtttaccgctgtgggttccagcccttcaaccaacatcttctgccctgggtcaagtgtacaaccgtcttcagatctcattgtatccagccttcagtcatcagacatgttcgttcttggagcaacatcccgtttatcactgtacccctcagtcgtacacatggaaagtccttcgcccaccgcagtgagctgaagcatgccaagagaatcgtggtgaagctcggcagtgccgtggtgacccgaggggatgaatgtggcctggccctggggcgcttggcatctattgttgagcaggtatcagtgctgcagaatcagggcagagagatgatgctggtgaccagtggagccgtagcctttggcaaacaacgcttgcgccatgagatccttctgtctcagagcgtgcggcaggccctccactcggggcagaaccagctgaaagaaatggcaattccagtcttagaggcacgagcctgtgcagctgccggacagagtgggctgatggccttgtatgaggctatgtttacccagtacagcatctgtgctgcccagattttggtgaccaatttggatttccatgatgagcagaagcgccggaacctcaatggaacacttcatgaactccttagaatgaacattgtccccattgtcaacacaaatgatgctgttgtccccccagctgagcccaacagtgacctgcagggggtaaatgttattagtgttaaagataatgatagcctggctgcccgactggctgtggaaatgaaaactgatctcttgattgttctttcagatgtagaaggcctttttgacagccccccaggttcagatgatgcaaagcttattgatatattttatcccggagatcagcagtctgtgacatttggaaccaagtctagagtgggaatgggtggcatggaagccaaggtgaaagcagccctctgggctttgcaaggtggcacttctgttgttattgccaatggaacccacccaaaggtgtctgggcacgtcatcacagacattgtggaggggaagaaagttggtaccttcttttcagaagtaaagcctgcaggccctactgttgagcagcagggagaaatggcgcgatctggaggaaggatgttggccaccttggaacctgagcagagagcagaaattatccatcatctggctgatctgttgacggaccagcgtgatgagatcctgttagccaacaaaaaagacttggaggaggcagaggggagacttgcagctcctctgctgaaacgtttaagcctctccacatccaaattgaacagcctggccatcggtctgcgacagatcgcagcctcctcccaggacagcgtgggacgtgttttgcgccgcacccgaatcgccaaaaacttggaactggaacaagtgactgtcccaattggagttctgctggtgatctttgaatctcgtcctgactgtctaccccaggtggcagctttggctatcgcaagtggcaatggcttgttactcaaaggagggaaggaggctgcacacagcaaccggattctccacctcctgacccaggaggctctctcaatccatggagtcaaggaggccgtgcaactggtgaataccagagaagaagttgaagatctttgccgcctagacaaaatgatagatctgatcattccacgtggctcttcccagctggtcagagacatccagaaagctgctaaggggattccagtgatggggcacagcgaagggatctgtcacatgtatgtggattccgaggccagtgttgataaggtcaccaggctagtcagagactctaaatgtgaatatccagctgcctgtaatgctttggagactttgttaatccaccgggatctgctcaggacaccattatttgaccagatcattgatatgctgagagtggaacaggtaaaaattcatgcaggccccaaatttgcctcctatctgaccttcagcccctccgaagtgaagtcactccgaactgagtatggggacctggaattatgcattgaagtagtggacaacgttcaggatgccattgaccacatccacaagtatggcagctcccacacggatgtcatcgtcacagaggacgaaaacacagcggagttcttcctgcagcacgtagacagtgcctgtgtgttctggaatgccagcactcgcttttctgatggttaccgctttggactgggagctgaagtgggaatcagtacatcgagaatccacgcccggggaccagtaggacttgagggactgcttactactaagtggctgctgcgagggaaggaccacgtggtctcagatttctcagagcatggaagtttaaaatatcttcatgagaacctccctattcctcagagaaacaccaactgaaaagagccaggaaaacccgggaattttccaaaaggtcttcacgttaaacttgtcttatctcaggagagagcccgctcttgtctcccagttcctggtagggtctgcctgttggaaagtgtacctggatgcttctgggctccgtttggcaatagcaatcttggctgatgtgcacagtctggctcccagctcaccctttttttttaaagtaagaaaatagttgctaccgatagggactttgccaagtccaattatcttctaggattgaaaggtgcattttccccataaaaaaggcgaggaaaacccatggctgctttgtgtcacctcagtgacttacagtcccccttcgcatttagttggtactagagccagtcatccttaacaaatcttttcgcgttttatttctttcacatgtagtcatcttcaaaaaggaaagatttggaattttagaaaaggggcaactcttctttttagcattctcatcagaaagtcacaaaaatcgatggaatcatttccactgggaagattgaccttttgtatttatttgtggggtaaattaataagcattccagatgcttgcagcttcctgcatccaggagatgctgtgtcccccgtgatgcagctggaacccaagctgcagcaggagatgcaagtttcaggatgttccccactgagctggaggaatatctacagcagtgatgcttgaaatttttgtatgaattattttgtcgtcctacccttttcctccaaaacaaaaattagaggattattttaatactttggattcttcccccttttttgagaaataaagttttttatg

SEQ ID NO: 219 - protein, 795 aa, Homo sapiens [sequence omitted]

SEQ ID NO: 220 - DNA, 552 bp, Homo sapiens
gttttaaagttttatttgcttacaaaagaaaatggaaataggtttgcgaaaacttatctgcatgtacaaagtaatccccgtagataaggagaggcaacccctggaacaaactgctggataaatcgttcattaaaattatatctctttgcatcagagctggtggaaaatcattatttcacatgagttaaaaccactgaaaaactaaatctgtttcttaaactaccaaatttcagaaaagcttaaatccaaatgctgatttttggatacacatgaaaccagttaccaagtgatctcagagttggacagatcaattaaacaagaggtagtttctccaatattgtccctttttttcttatcagcaaggttattcctatagcaagtaggagtaagtgacatattctttgaacctctttgaattcttttcctgctagggacatatttccctcaaacacaatcatatctgtttgttcattttaggacttgagagagaagattccagagttcaatttatttttcccaattcctctttgagctctcttctctggaaaaaca

SEQ ID NO: 221 - protein, 165 aa, Homo sapiens
MKIFQRKMRYWLLPPFLAIVYFCTIVQGQVAPPTRLRYNVISHDSIQISWKAPRGKFGGYKLLVTPTSGGKTNQLNLQNTATKAIIQGLMPDQNYTVQIIAYNKDKESKPAQGQFRIKDLEKRKDPKPRVKVVDRGNGSRPSSPEEVKFVCQTPAIADIVILVDG

SEQ ID NO: 222 - DNA, 644 bp, Homo sapiens
  misc_feature (383)..(383): n is a, c, g, or t
  misc_feature (392)..(392): n is a, c, g, or t
  misc_feature (416)..(416): n is a, c, g, or t
  misc_feature (477)..(477): n is a, c, g, or t
  misc_feature (483)..(483): n is a, c, g, or t
  misc_feature (523)..(523): n is a, c, g, or t
  misc_feature (564)..(564): n is a, c, g, or t
  misc_feature (593)..(593): n is a, c, g, or t
  misc_feature (602)..(602): n is a, c, g, or t
  misc_feature (619)..(619): n is a, c, g, or t
  misc_feature (627)..(627): n is a, c, g, or t
tagagaaggagattacaccactttaatgcaatgatgctgaagatgtaaaattaggaagagacgttcatgttctctgtacaatacatccatttacagaatcagccagtactgtgtacaacatataaatacatgataaaacattagaggtgcatagagcatacttacagaagccaaaaagttcactttatacatccaagaataaagagttaaaaatataaaaataagaaacacacactgctttgaaatgtaaaatgactttcacatacacaggtgcgtggagatgcccactcccatagggtccaaagtgacagggaggatgtcaagcagaggaattcacctgcaaacatctgggacggctgactcacaaggtctacagatgggcnttttcatanggaaagacaaccctattcccccanccccattggtccaagcagagtattcaaggttccaaatgatcccgtggggttaagtggatcnccctgngacggaaagtttccaaatttgcttcgcaacagaaccaagntcaacttgctccgtcactgggcaatggctcactgtggaccngaggtcagcaggtgcacagccccctggtnggcaatgcngggagttactttaaccngtgctggnttcttcctggccatcaa

SEQ ID NO: 223 - protein, 1541 aa, Homo sapiens
MKDKQKKKKERTWAEAARLVLENYSDAPMTPKQILQVIEAEGLKEMRSGTSPLACLNAMLHSNSRGGEGLFYKLPGRISLFTLKKDALQWSRHPATVEGEEPEDTADVESCGSNEASTVSGENDVSLDETSSNASCSTESQSRPLSNPRDSYRASSQANKQKKKTGVMLPRVVLTPLKVNGAHVESASGFSGCHADGESGSPSSSSSGSLALGSAAIRGQAEVTQDPAPLLRGFRKPATGQMKRNRGEEIDFETPGSILVNTNLRALINSRTFHALPSHFQQQLLFLLPEVDRQVGTDGLLRLSSSALNNEFFTHAAQSWRERLADGEFTHEMQVRIRQEMEKEKKVEQWKEKFFEDYYGQKLGLTKEESLQQNVGQEEAEIKSGLCVPGESVRIQRGPATRQRDGHFKKRSRPDLRTRARRNLYKKQESEQAGVAKDAKSVASDVPLYKDGEAKTDPAGLSSPHLPGTSSAAPDLEGPEFPVESVASRIQAEPDNLARASASPDRIPSLPQETVDQEPKDQKRKSFEQAASASFPEKKPRLEDRQSFRNTIESVHTEKPQPTKEEPKVPPIRIQLSRIKPPWVVKGQPTYQICPRIIPTTESSCRGWTGARTLADIKARALQVRGARGHHCHREAATTAIGGGGGPGGGGGGATDEGGGRGSSSGDGGEACGHPEPRGGPSTPGKCTSDLQRTQLLPPYPLNGEHTQAGTAMSRARREDLPSLRKEESCLLQRATVGLTDGLGDASQLPVAPTGDQPCQALPLLSSQTSVAERLVEQPQLHPDVRTECESGTTSWESDDEEQGPTVPADNGPIPSLVGDDTLEKGTGQALDSHPTMKDPVNVTPSSTPESSPTDCLQNRAFDDELGLGGSCPPMRESDTRQENLKTKALVSNSSLHWIPIPSNDEVVKQPKPESREHIPSVEPQVGEEWEKAAPTPPALPGDLTAEEGLDPLDSLTSLWTVPSRGGSDSNGSYCQQVDIEKLKINGDSEALSPHGESTDTASDFEGHLTEDSSEADTREAAVTKGSSVDKDEKPNWNQSAPLSKVNGDMRLVTRTDGMVAPQSWVSRVCAVRQKIPDSLLLASTEYQPRAVCLSMPGSSVEATNPLVMQLLQGSLPLEKVLPPAHDDSMSESPQVPLTKDQSHGSLRMGSLHGLGKNSGMVDGSSPSSLRALKEPLLPDSCETGTGLARIEATQAPGAPQKNCKAVPSFDSLHPVTNPITSSRKLEEMDSKEQFSSFSCEDQKEVRAMSQDSNSNAAPGKSPGDLTTSRTPRFSSPNVISFGPEQTGRALGDQSNVTGQGKKLFGSGNVAATLQRPRPADPMPLPAEIPPVFPSGKLGPSTNSMSGGVQTPREDWAPKPHAFVGSVKNEKTFVGGPLKANAENRKATGHSPLELVGHLEGMPFVMDLPFWKLPREPGKGLSEPLEPSSLPSQLSIKQAFYGKLSKLQLSSTSFNYSSSSPTFPKGLAGSVVQLSHKANFGASHSASLSLQMFTDSSTVESISLQCACSLKAMIMCQGCGAFCHDDCIGPSKLCVLCLVVR

SEQ ID NO: 224 - DNA, 2629 bp, Homo sapiens
tcgctttcctgcgcagagtctgcggaggggctcggctgcaccggggggatcgcgcctggcagaccccagaccgagcagaggcgacccagcgcgctcgggagaggctgcaccgccgcgcccccgcctagcccttccggatcctgcgcgcagaaaagtttcatttgctgtatgccatcctcgagagctgtctaggttaacgttcgcactctgtgtatataacctcgacagtcttggcacctaacgtgctgtgcgtagctgctcctttggttgaatccccaggcccttgttggggcacaaggtggcaggatgtctcagtggtacgaacttcagcagcttgactcaaaattcctggagcaggttcaccagctttatgatgacagttttcccatggaaatcagacagtacctggcacagtggttagaaaagcaagactgggagcacgctgccaatgatgtttcatttgccaccatccgttttcatgacctcctgtcacagctggatgatcaatatagtcgcttttctttggagaataacttcttgctacagcataacataaggaaaagcaagcgtaatcttcaggataattttcaggaagacccaatccagatgtctatgatcatttacagctgtctgaaggaagaaaggaaaattctggaaaacgcccagagatttaatcaggctcagtcggggaatattcagagcacagtgatgttagacaaacagaaagagcttgacagtaaagtcagaaatgtgaaggacaaggttatgtgtatagagcatgaaatcaagagcctggaagatttacaagatgaatatgacttcaaatgcaaaaccttgcagaacagagaacacgagaccaatggtgtggcaaagagtgatcagaaacaagaacagctgttactcaagaagatgtatttaatgcttgacaataagagaaaggaagtagttcacaaaataatagagttgctgaatgtcactgaacttacccagaatgccctgattaatgatgaactagtggagtggaagcggagacagcagagcgcctgtattggggggccgcccaatgcttgcttggatcagctgcagaactggttcactatagttgcggagagtctgcagcaagttcggcagcagcttaaaaagttggaggaattggaacagaaatacacctacgaacatgaccctatcacaaaaaacaaacaagtgttatgggaccgcaccttcagtcttttccagcagctcattcagagctcgtttgtggtggaaagacagccctgcatgccaacgcaccctcagaggccgctggtcttgaagacaggggtccagttcactgtgaagttgagactgttggtgaaattgcaagagctgaattataatttgaaagtcaaagtcttatttgataaagatgtgaatgagagaaatacagtaaaaggatttaggaagttcaacattttgggcacgcacacaaaagtgatgaacatggaggagtccaccaatggcagtctggcggctgaatttcggcacctgcaattgaaagaacagaaaaatgctggcaccagaacgaatgagggtcctctcatcgttactgaagagcttcactcccttagttttgaaacccaattgtgccagcctggtttggtaattgacctcgagacgacctctctgcccgttgtggtgatctccaacgtcagccagctcccgagcggttgggcctccatcctttggtacaacatgctggtggcggaacccaggaatctgtccttcttcctgactccaccatgtgcacgatgggctcagctttcagaagtgctgagttggcagttttcttctgtcaccaaaagaggtctcaatgtggaccagctgaacatgttgggagagaagcttcttggtcctaacgccagccccgatggtctcattccgtggacgaggttttgtaaggaaaatataaatgataaaaattttcccttctggctttggattgaaagcatcctagaactcattaaaaaacacctgctccctctctggaatgatgggtgcatcatgggcttcatcagcaaggagcgagagcgtgccctgttgaaggaccagcagccggggaccttcctgctgcggttcagtgagagctcccgggaaggggccatcacattcacatgggtggagcggtcccagaacggaggcgaacctgacttccatgcggttgaaccctacacgaagaaagaactttctgctgttactttccctgacatcattcgcaattacaaagtcatggctgctgagaatattcctgagaatcccctgaagtatctgtatccaaatattgacaaagaccatgcctttggaaagtattactccaggccaaaggaagcaccagagccaatggaacttgatggccctaaaggaactggatatatcaagactgagttgatttctgtgtctgaagtgtaagtgaacacagaagagtgacatgtttacaaacctcaagccagccttgctcctggctggggcctgttgaagatgcttgtattttacttttccattgtaattgctatcgccatcacagctgaacttgttgagatccccgtgttactgcctatcagcattttactactttaaaaaaaaaaaaaaaaaa

SEQ ID NO: 225 - protein, 712 aa, Homo sapiens
MSQWYELQQLDSKFLEQVHQLYDDSFPMEIRQYLAQWLEKQDWEHAANDVSFATIRFHDLLSQLDDQYSRFSLENNFLLQHNIRKSKRNLQDNFQEDPIQMSMIIYSCLKEERKILENAQRFNQAQSGNIQSTVMLDKQKELDSKVRNVKDKVMCIEHEIKSLEDLQDEYDFKCKTLQNREHETNGVAKSDQKQEQLLLKKMYLMLDNKRKEVVHKIIELLNVTELTQNALINDELVEWKRRQQSACIGGPPNACLDQLQNWFTIVAESLQQVRQQLKKLEELEQKYTYEHDPITKNKQVLWDRTFSLFQQLIQSSFVVERQPCMPTHPQRPLVLKTGVQFTVKLRLLVKLQELNYNLKVKVLFDKDVNERNTVKGFRKFNILGTHTKVMNMEESTNGSLAAEFRHLQLKEQKNAGTRTNEGPLIVTEELHSLSFETQLCQPGLVIDLETTSLPVVVISNVSQLPSGWASILWYNMLVAEPRNLSFFLTPPCARWAQLSEVLSWQFSSVTKRGLNVDQLNMLGEKLLGPNASPDGLIPWTRFCKENINDKNFPFWLWIESILELIKKHLLPLWNDGCIMGFISKERERALLKDQQPGTFLLRFSESSREGAITFTWVERSQNGGEPDFHAVEPYTKKELSAVTFPDIIRNYKVMAAENIPENPLKYLYPNIDKDHAFGKYYSRPKEAPEPMELDGPKGTGYIKTELISVSEV

SEQ ID NO: 226 - DNA, 667 bp, Homo sapiens
  misc_feature (395)..(395): n is a, c, g, or t
tggcgcagtgggagaccacgttttattcagtccagttcaggatccccgctatctcagggctctctgggccagtcctcctgggagcccccaccacaacacttcccaggcatgagccctcaggggcccacatgagcttccacacactgagaagtgtccgagaaattggtggggcctctgaaggaggctgtgagcagcccacctgaactcccagctcaccagcccaaacagggtgcaggggctctggccctgaagaacctgagtggagtggaatggcactggctggccactcagctcagcgggcgacgtgcccctacaagttggcagaagtggctgccactgctgggtttgtgtaagagaggctgctgccaccattacctgcagaaaccttctcatangggctacgatcggtactgctagggggcacatagcgcccatgggtgtggtaggtgggtactcgctcataggatggtaggtatccccgggctggaagatgtccagcttgccgtagttctttccgcggcactgacagacagccaaggcaatgagatagacaatggccagcgcaacccagacacagaccagcaccagcagcgcgatgccccagcctggcaccccagccccagaactggcagagaaagaattgcacatcactcacgctgacgtctga

SEQ ID NO: 227 - protein, 273 aa, Homo sapiens
MTPGTQSPFFLLLLLTVLTVVTGSGHASSTPGGEKETSATQRSSVPSSTEKNALSTGVSFFFLSFHISNLQFNSSLEDPSTDYYQELQRDISEMFLQIYKQGGFLGLSNIKFRPGSVVVQLTLAFREGTINVHDVETQFNQYKTEAASRYNLTISDVSVSDVPFPFSAQSGAGVPGWGIALLVLVCVLVALAIVYLIALAVCQCRRKNYGQLDIFPARDTYHPMSEYPTYHTHGRYVPPSSTDRSPYETVSAGNGGSSLSYTNPAVAATSANL

SEQ ID NO: 228 - DNA, 784 bp, Homo sapiens
aggccatgagtgcggctgtgtgctttatgatcgacgcctctgtccacccaacgttggatttttgccgaagactggacagcatcgttgggccccagctcacagtgctggcctctgacatctgtgaacagtttaacatcaacaagaggatgtctgggtctgagaaagaaccccagtttaagtttatctacttcaaccacatgaatctcgccgagaagagcacagttcacatgaggaaaacgcccagcgtgtcgctcacttccgtgcacccggatttaatgaagattctcggtgacatcaacagtgactttaccagagtggatgaagatgaggagatcattgtgaaggccatgagtgattactgggttgttggaaagaagtctgatcggcgggagctctatgttattttgaatcaaaaaaatgcaaacctgattgaagtaaatgaagaggtcaagaaactttgtgcaacgcagttcaacaacatcttcttcttggattgacggatgacggctcaccgagagcatatctaaaaaacactctgcaaacatttggkcacatgcaagtkagtggkcatatgacggactgcattcaggacaagggtaaagcaatacttgctttgaagaatcagatttcgactcggtctgckgatckgaggkttttagattttaaatatttatgtggaattaattaaaggkagttggckatatcgckatcatttcattctktkgacattatttgaatatkttactggaaaataagactaataaattgttaaaaatttttaaaa

SEQ ID NO: 229 - protein, 482 aa, Homo sapiens
MAAAAAGAGSGPWAAQEKQFPPALLSFFIYNPRFGPREGQEENKILFYHPNEVEKNEKIRNVGLCEAIVQFTRTFSPSKPAKSLHTQKNRQFFNEPEENFWMVMVVRNPIIEKQSKDGKPVIEYQEEELLDKVYSSVLRQCYSMYKLFNGTFLKAMEDGGVKLLKERLEKFFHRYLQTLHLQSCDLLDIFGGISFFPLDKMTYLKIQSFINRMEESLNIVKYTAFLYNDQLIWSGLEQDDMRILYKYLTTSLFPRHIEPELAGRDSPIRAEMPGNLQHYGRFLTGPLNLNDPDAKCRFPKIFVNTDDTYEELHLIVYKAMSAAVCFMIDASVHPTLDFCRRLDSIVGPQLTVLASDICEQFNINKRMSGSEKEPQFKFIYFNHMNLAEKSTVHMRKTPSVSLTSVHPDLMKILGDINSDFTRVDEDEEIIVKAMSDYWVVGKKSDRRELYVILNQKNANLIEVNEEVKKLCATQFNNIFFLD

SEQ ID NO: 230 - DNA, 4909 bp, Homo sapiens
tagacgcaccctctgaagatggtgactccctcctgagaagctggaccccttggtaaaagacaaggccttctccaagaagaatatgaaagtgttactcagacttatttgtttcatagctctactgatttcttctctggaggctgataaatgcaaggaacgtgaagaaaaaataattttagtgtcatctgcaaatgaaattgatgttcgtccctgtcctcttaacccaaatgaacacaaaggcactataacttggtataaagatgacagcaagacacctgtatctacagaacaagcctccaggattcatcaacacaaagagaaactttggtttgttcctgctaaggtggaggattcaggacattactattgcgtggtaagaaattcatcttactgcctcagaattaaaataagtgcaaaatttgtggagaatgagcctaacttatgttataatgcacaagccatatttaagcagaaactacccgttgcaggagacggaggacttgtgtgcccttatatggagttttttaaaaatgaaaataatgagttacctaaattacagtggtataaggattgcaaacctctacttcttgacaatatacactttagtggagtcaaagataggctcatcgtgatgaatgtggctgaaaagcatagagggaactatacttgtcatgcatcctacacatacttgggcaagcaatatcctattacccgggtaatagaatttattactctagaggaaaacaaacccacaaggcctgtgattgtgagcccagctaatgagacaatggaagtagacttgggatcccagatacaattgatctgtaatgtcaccggccagttgagtgacattgcttactggaagtggaatgggtcagtaattgatgaagatgacccagtgctaggggaagactattacagtgtggaaaatcctgcaaacaaaagaaggagtaccctcatcacagtgcttaatatatcggaaattgaaagtagattttataaacatccatttacctgttttgccaagaatacacatggtatagatgcagcatatatccagttaatatatccagtcactaatttccagaagcacatgattggtatatgtgtcacgttgacagtcataattgtgtgttctgttttcatctataaaatcttcaagattgacattgtgctttggtacagggattcctgctatgattttctcccaataaaagcttcagatggaaagacctatgacgcatatatactgtatccaaagactgttggggaagggtctacctctgactgtgatatttttgtgtttaaagtcttgcctgaggtcttggaaaaacagtgtggatataagctgttcatttatggaagggatgactacgttggggaagacattgttgaggtcattaatgaaaacgtaaagaaaagcagaagactgattatcattttagtcagagaaacatcaggcttcagctggctgggtggttcatctgaagagcaaatagccatgtataatgctcttgttcaggatggaattaaagttgtcctgcttgagctggagaaaatccaagactatgagaaaatgccagaatcgattaaattcattaagcagaaacatggggctatccgctggtcaggggactttacacagggaccacagtctgcaaagacaaggttctggaagaatgtcaggtaccacatgccagtccagcgacggtcaccttcatctaaacaccagttactgtcaccagccactaaggagaaactgcaaagagaggctcacgtgcctctcgggtagcatggagaagttgccaagagttctttaggtgcctcctgtcttatggcgttgcaggccaggttatgcctcatgctgacttgcagagttcatggaatgtaactatatcatcctttatccctgaggtcacctggaatcagattattaagggaataagccatgacgtcaatagcagcccagggcacttcagagtagagggcttgggaagatcttttaaaaaggcagtaggcccggtgtggtggctcacgcctataatcccagcactttgggaggctgaagtgggtggatcaccagaggtcaggagttcgagaccagcccagccaacatggcaaaaccccatctctactaaaaatacaaaaatgagctaggcatggtggcacacgcctgtaatcccagctacacctgaggctgaggcaggagaattgcttgaaccggggagacggaggttgcagtgagccgagtttgggccactgcactctagcctggcaacagagcaagactccgtctcaaaaaaagggcaataaatgccctctctgaatgtttgaactgccaagaaaaggcatggagacagcgaactagaagaaagggcaagaaggaaatagccaccgtctacagatggcttagttaagtcatccacagcccaagggcggggctatgccttgtctggggaccctgtagagtcactgaccctggagcggctctcctgagaggtgctgcaggcaaagtgagactgacacctcactgaggaagggagacatattcttggagaactttccatctgcttgtattttccatacacatccccagccagaagttagtgtccgaagaccgaattttattttacagagcttgaaaactcacttcaatgaacaaagggattctccaggattccaaagttttgaagtcatcttagctttccacaggagggagagaacttaaaaaagcaacagtagcagggaattgatccacttcttaatgctttcctccctggcatgaccatcctgtcctttgttattatcctgcattttacgtctttggaggaacagctccctagtggcttcctccgtctgcaatgtcccttgcacagcccacacatgaaccatccttcccatgatgccgctcttctgtcatcccgctcctgctgaaacacctcccaggggctccacctgttcaggagctgaagcccatgctttcccaccagcatgtcactcccagaccacctccctgccctgtcctccagcttcccctcgctgtcctgctgtgtgaattcccaggttggcctggtggccatgtcgcctgcccccagcactcctctgtctctgctcttgcctcgacccttcctcctcctttgcctaggaggccttctcgcattttctctagctgatcagaattttaccaaaattcagaacatcctccaattccacagtctctgggagactttccctaagaggcgacttcctctccagccttctctctctggtcaggcccactgcagagatggtggtgagcacatctgggaggctggtctccctccagctggaattgctgctctctgagggagaggctgtggtggctgtctctgtccctcactgccttccaggagcaatttgcacatgtaacatagatttatgtaatgctttatgtttaaaaacattccccaattatcttatttaatttttgcaattattctaattttatatatagagaaagtgacctattttttaaaaaaatcacactctaagttctattgaacctaggacttgagcctccatttctggcttctagtctggtgttctgagtacttgatttcaggtcaataacggtcccccctcactccacactggcacgtttgtgagaagaaatgacattttgctaggaagtgaccgagtctaggaatgcttttattcaagacaccaaattccaaacttctaaatgttggaattttcaaaaattgtgtttagattttatgaaaaactcttctactttcatctattctttccctagaggcaaacatttcttaaaatgtttcattttcattaaaaatgaaagccaaatttatatgccaccgattgcaggacacaagcacagttttaagagttgtatgaacatggagaggacttttggtttttatatttctcgtatttaatatgggtgaacaccaacttttatttggaataataattttcctcctaaacaaaaacacattgagtttaagtctctgactcttgcctttccacctgctttctcctgggcccgctttgcctgcttgaaggaacagtgctgttctggagctgctgttccaacagacagggcctagctttcatttgacacacagactacagccagaagcccatggagcagggatgtcacgtcttgaaaagcctattagatgttttacaaatttaattttgcagattattttagtctgtcatccagaaaatgtgtcagcatgcatagtgctaagaaagcaagccaatttggaaacttaggttagtgacaaaattggccagagagtgggggtgatgatgaccaagaattacaagtagaatggcagctggaatttaaggagggacaagaatcaatggataagcgtgggtggaggaagatccaaacagaaaagtgcaaagttattccccatcttccaagggttgaattctggaggaagaagacacattcctagttccccgtgaacttcctttgacttattgtccccactaaaacaaaacaaaaaacttttaatgccttccacattaattagattttcttgcagtttttttatggcatttttttaaagatgccctaagtgttgaagaagagtttgcaaatgcaacaaaatatttaattaccggttgttaaaactggtttagcacaatttatattttccctctcttgcctttcttatttgcaataaaaggtattgagccattttttaaatgacatttttgataaattatgtttgtactagttgatgaaggagttttttttaacctgtttatataattttgcagcagaagccaaattttttgtatattaaagcaccaaattcatgtacagcatgcatcacggatcaatagactgtacttattttccaataaaattttcaaactttgtactgttaaa

SEQ ID NO: 231 - protein, 569 aa, Homo sapiens
MKVLLRLICFIALLISSLEADKCKEREEKIILVSSANEIDVRPCPLNPNEHKGTITWYKDDSKTPVSTEQASRIHQHKEKLWFVPAKVEDSGHYYCVVRNSSYCLRIKISAKFVENEPNLCYNAQAIFKQKLPVAGDGGLVCPYMEFFKNENNELPKLQWYKDCKPLLLDNIHFSGVKDRLIVMNVAEKHRGNYTCHASYTYLGKQYPITRVIEFITLEENKPTRPVIVSPANETMEVDLGSQIQLICNVTGQLSDIAYWKWNGSVIDEDDPVLGEDYYSVENPANKRRSTLITVLNISEIESRFYKHPFTCFAKNTHGIDAAYIQLIYPVTNFQKHMIGICVTLTVIIVCSVFIYKIFKIDIVLWYRDSCYDFLPIKASDGKTYDAYILYPKTVGEGSTSDCDIFVFKVLPEVLEKQCGYKLFIYGRDDYVGEDIVEVINENVKKSRRLIIILVRETSGFSWLGGSSEEQIAMYNALVQDGIKVVLLELEKIQDYEKMPESIKFIKQKHGAIRWSGDFTQGPQSAKTRFWKNVRYHMPVQRRSPSSKHQLLSPATKEKLQREAHVPLG

SEQ ID NO: 232 - DNA, 557 bp, Homo sapiens
tagtaaaagaaggattttaggtttctttggtgaaacaaaagcagatataaaaagttacaaagattttagattttcattcacaaaaaaagtcattcacattttacactatacacgttatgatataaatacaggaaagtattatgtgcattgtaaagagaaaggaaaaatagaaacctactagatcaacacagtgttgttctgtgctctaaaatacctaaaggtggattacatttaatgcaacaaccaagggaacctgcttaaacatactgtgtattattgtagctagagtcattccttctaagccaaaggaggttttataaaaaagaatcaatattgggccaatccctttgtgccctttttctctttttctatgtgcattttattttttgtctactcttcttcaagttgctctaaactgaaattagggaaggagtctcactttccattacaggtttttctttaaacattaaattaagtggataaggattcaaagtcatcttcagcagtcactttattcaaataatggggagaaaacagagtgggaagagatggggaga

SEQ ID NO: 233 - protein, 3396 aa, Homo sapiens
MFINIKSILWMCSTLIVTHALHKVKVGKSPPVRGSLSGKVSLPCHFSTMPTLPPSYNTSEFLRIKWSKIEVDKNGKDLKETTVLVAQNGNIKIGQDYKGRVSVPTHPEAVGDASLTVVKLLASDAGLYRCDVMYGIEDTQDTVSLTVDGVVFHYRAATSRYTLNFEAAQKACLDVGAVIATPEQLFAAYEDGFEQCDAGWLADQTVRYPIRAPRVGCYGDKMGKAGVRTYGFRSPQETYDVYCYVDHLDGDVFHLTVPSKFTFEEAAKECENQDARLATVGELQAAWRNGFDQCDYGWLSDASVRHPVTVARAQCGGGLLGVRTLYRFENQTGFPPPDSRFDAYCFKPKEATTIDLSILAETASPSLSKEPQMVSDRTTPIIPLVDELPVIPTEFPPVGNIVSFEQKATVQPQAITDSLATKLPTPTGSTKKPWDMDDYSPSASGPLGKLDISEIKEEVLQSTTGVSHYATDSWDGVVEDKQTQESVTQIEQIEVGPLVTSMEILKHIPSKEFPVTETPLVTARMILESKTEKKMVSTVSELVTTGHYGFTLGEEDDEDRTLTVGSDESTLIFDQIPEVITVSKTSEDTIHTHLEDLESVSASTTVSPLIMPDNNGSSMDDWEERQTSGRITEEFLGKYLSTTPFPSQHRTEIELFPYSGDKILVEGISTVIYPSLQTEMTHRRERTETLIPEMRTDTYTDEIQEEITKSPFMGKTEEEVFSGMKLSTSLSEPIHVTESSVEMTKSFDFPTLITKLSAEPTEVRDMEEDFTATPGTTKYDENITTVLLAHGTLSVEAATVSKWSWDEDNTTSKPLESTEPSASSKLPPALLTTVGMNGKDKDIPSFTEDGADEFTLIPDSTQKQLEEVTDEDIAAHGKFTIRFQPTTSTGIAEKSTLRDSTTEEKVPPITSTEGQVYATMEGSALGEVEDVDLSKPVSTVPQFAHTSEVEGLAFVSYSSTQEPTTYVDSSHTIPLSVIPKTDWGVLVPSVPSEDEVLGEPSQDILVIDQTRLEATISPETMRTTKITEGTTQEEFPWKEQTAEKPVPALSSTAWTPKEAVTPLDEQEGDGSAYTVSEDELLTGSERVPVLETTPVGKIDHSVSYPPGAVTEHKVKTDEVVTLTPRIGPKVSLSPGPEQKYETEGSSTTGFTSSLSPFSTHITQLMEETTTEKTSLEDIDLGSGLFEKPKATELIEFSTIKVTVPSDITTAFSSVDRLHTTSAFKPSSAITKKPPLIDREPGEETTSDMVIIGESTSHVPPTTLEDIVAKETETDIDREYFTTSSPPATQPTRPPTVEDKEAFGPQALSTPQPPASTKFHPDINVYIIEVRENKTGRMSDLSVIGHPIDSESKEDEPCSEETDPVHDLMAEILPEFPDIIEIDLYHSEENEEEEEECANATDVTTTPSVQYINGKHLVTTVPKDPEAAEARRGQFESVAPSQNFSDSSESDTHPFVIAKTELSTAVQPNESTETTESLEVTWKPETYPETSEHFSGGEPDVFPTVPFHEEFESGTAKKGAESVTERDTEVGHQAHEHTEPVSLFPEESSGEIAIDQESQKIAFARATEVTFGEEVEKSTSVTYTPTIVPSSASAYVSEEEAVTLIGNPWPDDLLSTKESWVEATPRQVVELSGSSSIPITEGSGEAEEDEDTMFTMVTDLSQRNTTDTLITLDTSRIITESFFEVPATTIYPVSEQPSAKVVPTKFVSETDTSEWISSTTVEEKKRKEEEGTTGTASTFEVYSSTQRSDQLILPFELESPNVATSSDSGTRKSFMSLTTPTQSEREMTDSTPVFTETNTLENLGAQTTEHSSIHQPGVQEGLTTLPRSPASVFMEQGSGEAAADPETTTVSSFSLNVEYAIQAEKEVAGTLSPHVETTFSTEPTGLVLSTVMDRVVAENITQTSREIVISERLGEPNYGAEIRGFSTGFPLEEDFSGDFREYSTVSHPIAKEETVMMEGSGDAAFRDTQTSPSTVPTSVHISHISDSEGPSSTMVSTSAFPWEEFTSSAEGSGEQLVTVSSSVVPVLPSAVQKFSGTASSIIDEGLGEVGTVNEIDRRSTILPTAEVEGTKAPVEKEEVKVSGTVSTNFPQTIEPAKLWSRQEVNPVRQEIESETTSEEQIQEEKSFESPQNSPATEQTIFDSQTFTETELKTTDYSVLTTKKTYSDDKEMKEEDTSLVNMSTPDPDANGLESYTTLPEATEKSHFFLATALVTESIPAEHVVTDSPIKKEESTKHFPKGMRPTIQESDTELLFSGLGSGEEVLPTLPTESVNFTEVEQINNTLYPHTSQVESTSSDKIEDFNRMENVAKEVGPLVSQTDIFEGSGSVTSTTLIEILSDTGAEGPTVAPLPFSTDIGHPQNQTVRWAEEIQTSRPQTITEQDSNKNSSTAEINETTTSSTDFLARAYGFEMAKEFVTSAPKPSDLYYEPSGEGSGEVDIVDSFHTSATTQATRQESSTTFVSDGSLEKHPEVPSAKAVTADGFPTVSVMLPLHSEQNKSSPDPTSTLSNTVSYERSTDGSFQDRFREFEDSTLKPNRKKPTENIIIDLDKEDKDLILTITESTILEILPELTSDKNTIIDIDHTKPVYEDILGMQTDIDTEVPSEPHDSNDESNDDSTQVQEIYEAAVNLSLTEETFEGSADVLASYTQATHDESMTYEDRSQLDHMGFHFTTGIPAPSTETELDVLLPTATSLPIPRKSATVIPEIEGIKAEAKALDDMFESSTLSDGQAIADQSEIIPTLGQFERTQEEYEDKKHAGPSFQPEFSSGAEEALVDHTPYLSIATTHLMDQSVTEVPDVMEGSNPPYYTDTTLAVSTFAKLSSQTPSSPLTIYSGSEASGHTEIPQPSALPGIDVGSSVMSPQDSFKEIHVNIEATFKPSSEEYLHITEPPSLSPDTKLEPSEDDGKPELLEEMEASPTELIAVEGTEILQDFQNKTDGQVSGEAIKMFPTIKTPEAGTVITTADEIELEGATQWPHSTSASATYGVEAGVVPWLSPQTSERPTLSSSPEINPETQAALIRGQDSTIAASEQQVAARILDSNDQATVNPVEFNTEVATPPFSLLETSNETDFLIGINEESVEGTAIYLPGPDRCKMNPCLNGGTCYPTETSYVCTCVPGYSGDQCELDFDECHSNPCRNGATCVDGFNTFRCLCLPSYVGALCEQDTETCDYGWHKFQGQCYKYFAHRRTWDAAERECRLQGAHLTSILSHEEQMFVNRVGHDYQWIGLNDKMFEHDFRWTDGSTLQYENWRPNQPDSFFSAGEDCVVIIWHENGQWNDVPCNYHLTYTCKKGTVACGQPPVVENAKTFGKMKPRYEINSLIRYHCKDGFIQRHLPTIRCLGNGRWAIPKITCMNPSAYQRTYSMKYFKNSSSAKDNSINTSKHDHRWSRRWQESRR

SEQ ID NO: 234 - DNA, 1705 bp, Homo sapiens
gggcggcggcgcgcgggtgcgatcgcggagctgtgaggcgcaggcagggctctggggcacctagagaccggggccggagacgtggcagccgccctgcccgccagaaagtttcctagaagtttgctgggcgcgggcgcacgactgactggctggaccatgaacgtgttccgaatcctcggcgacctgagccacctcctggccatgatcttgctgctggggaagatctggaggtccaagtgctgcaagggcatctctgggaagagccagatcctgtttgctctcgtcttcaccaccaggtacctggacctgttcaccaacttcatctccatctacaacacagtaatgaaggtggtttttctcctctgtgcctatgttacagtgtacatgatatatgggaaattccgtaaaacttttgacagtgagaatgacacattccgcctggagtttcttctggtcccagtcattggcctttccttccttgaaaactacagtttcactctgctggagatcctctggactttctctatctatctggaatcagtggctatcctgccccagctcttcatgatcagcaagactggagaggctgagaccataactactcactacctgttctttctgggtctgtaccgggcactctacctggctaactggatcaggcggtaccagactgagaatttctatgaccaaattgcagtcgtgtctggagtagtacaaaccatcttctactgtgacttcttctacttgtatgtgaccaaagtccttaagggaaagaagttaagtcttccaatgccaatctgaggaccttcagagacagtctacgccttaacaagcacatgaaggaaactattttgaatgttctctttggcaacttatccataatttgggatcaaatgttaaaaccagaaaagtgtttagtgtggatttcagcaaaacctgatcatcccacccagaagaccttctcatcaatagatcgcccttaaagacccattgtaaggtcataaaaaacctcggccacctgcacaaagatggtgcctcactgcaacaagaaaccttaaggtgtcttaccgacgaaataaaaaacataaatgattgttctccaaggcctgagggcaagactcatgatgagcaagtcaaccccaatctggaacaatgtccctcctcttagaatgtcccaactaaagaccagttaaaatattagggtacgttcttgtgaatttccactttccaggtagatgaccaaatttaggtggtcaagatataaaggtgtcagctagttttaagtgtgaaacttatttcactttcacactgccttcaggccagaagcaaaccaaatttaccaggtttggctggaggagttttgtgactcatcttttactggtttgaattttttcaaaccagtggctgatacctgccttgtacttagtaccttaataccaataacctaatggtacttaggcgagtaccatttgcacaatcactgttttacttatgagcagatacagatatatccaaacccttacctactaggtatcctgctagggttttcaattccaattcttgtattaagttttttcctttcagttttaggtgcgaaagtaatcagtcaatccaatatcccccatctttgtcttgaaacaaaaactgttttaagacgtctacgttgaattattcagagaattaagcaataaaagctcacacctta

SEQ ID NO: 235 - protein, 214 aa, Homo sapiens
MNVFRILGDLSHLLAMILLLGKIWRSKCCKGISGKSQILFALVFTTRYLDLFTNFISIYNTVMKVVFLLCAYVTVYMIYGKFRKTFDSENDTFRLEFLLVPVIGLSFLENYSFTLLEILWTFSIYLESVAILPQLFMISKTGEAETITTHYLFFLGLYRALYLANWIRRYQTENFYDQIAVVSGVVQTIFYCDFFYLYVTKVLKGKKLSLPMPI

SEQ ID NO: 236 - DNA, 1812 bp, Homo sapiens
tagctaggcaggaagtcggcgcgggcggcgcggacagtatctgtgggtacccggagcacggagatctcgccggctttacgttcacctcggtgtctgcagcaccctccgcttcctctcctaggcgacgagacccagtggctagaagttcaccatgtctattctcaagatccatgccagggagatctttgactctcgcgggaatcccactgttgaggttgatctcttcacctcaaaaggtctcttcagagctgctgtgcccagtggtgcttcaactggtatctatgaggccctagagctccgggacaatgataagactcgctatatggggaagggtgtctcaaaggctgttgagcacatcaataaaactattgcgcctgccctggttagcaagaaactgaacgtcacagaacaagagaagattgacaaactgatgatcgagatggatggaacagaaaataaatctaagtttggtgcgaacgccattctgggggtgtcccttgccgtctgcaaagctggtgccgttgagaagggggtccccctgtaccgccacatcgctgacttggctggcaactctgaagtcatcctgccagtcccggcgttcaatgtcatcaatggcggttctcatgctggcaacaagctggccatgcaggagttcatgatcctcccagtcggtgcagcaaacttcagggaagccatgcgcattggagcagaggtttaccacaacctgaagaatgtcatcaaggagaaatatgggaaagatgccaccaatgtgggggatgaaggcgggtttgctcccaacatcctggagaataaagaaggcctggagctgctgaagactgctattgggaaagctggctacactgataaggtggtcatcggcatggacgtagcggcctccgagttcttcaggtctgggaagtatgacctggacttcaagtctcccgatgaccccagcaggtacatctcgcctgaccagctggctgacctgtacaagtccttcatcaaggactacccagtggtgtctatcgaagatccctttgaccaggatgactggggagcttggcagaagttcacagccagtgcaggaatccaggtagtgggggatgatctcacagtgaccaacccaaagaggatcgccaaggccgtgaacgagaagtcctgcaactgcctcctgctcaaagtcaaccagattggctccgtgaccgagtctcttcaggcgtgcaagctggcccaggccaatggttggggcgtcatggtgtctcatcgttcgggggagactgaagataccttcatcgctgacctggttgtggggctgtgcactgggcagatcaagactggtgccccttgccgatctgagcgcttggccaagtacaaccagctcctcagaattgaagaggagctgggcagcaaggctaagtttgccggcaggaacttcagaaaccccttggccaagtaagctgtgggcaggcaagcccttcggtcacctgttggctacacagacccctcccctcgtgtcagctcaggcagctcgaggcccccgaccaacacttgcaggggtccctgctagttagcgccccaccgccgtggagttcgtaccgcttccttagaacttctacagaagccaagctccctggagccctgttggcagctctagctttgcagtcgtgtaattggcccaagtcattgtttttctcgcctcactttccaccaagtgtctagagtcatgtgagcctcgtgtcatctccggggtggccacaggctagatccccggtggttttgtgctcaaaataaaaagcctcagtgacccatgag

SEQ ID NO: 237 - protein, 434 aa, Homo sapiens
MSILKIHAREIFDSRGNPTVEVDLFTSKGLFRAAVPSGASTGIYEALELRDNDKTRYMGKGVSKAVEHINKTIAPALVSKKLNVTEQEKIDKLMIEMDGTENKSKFGANAILGVSLAVCKAGAVEKGVPLYRHIADLAGNSEVILPVPAFNVINGGSHAGNKLAMQEFMILPVGAANFREAMRIGAEVYHNLKNVIKEKYGKDATNVGDEGGFAPNILENKEGLELLKTAIGKAGYTDKVVIGMDVAASEFFRSGKYDLDFKSPDDPSRYISPDQLADLYKSFIKDYPVVSIEDPFDQDDWGAWQKFTASAGIQVVGDDLTVTNPKRIAKAVNEKSCNCLLLKVNQIGSVTESLQACKLAQANGWGVMVSHRSGETEDTFIADLVVGLCTGQIKTGAPCRSERLAKYNQLLRIEEELGSKAKFAGRNFRNPLAK

SEQ ID NO: 238 - DNA, 1121 bp, Homo sapiens
  misc_feature (797)..(797): n is a, c, g, or t
ttttttttttttttttttattaattacctggtaacctttattcgggaagtgaaagtaactgtgaaacagtgcttcataaggcgtggcatacaaggccttggtttccaacgccggcgaggatgaggcccagtcccacactccctcgcaggcacccttgctaagatgtcctccgtgggtgaccaaaacggtggtaacatagccaaggttactttaactggggtaggatgactgcagaaggaatggctacacagagcttccagaacctttccatgcgttgtgctctccagaaggatgcgccaggtgtttcagatttgcttgcacaaagacagggtgttgcgccccacccaccctgggctgggcagcaagaggtctgctcacctactggaccagaatttcctagacctccttccacactccgaatcttcaagcaggatgaaaagagaccacagaaactgaagcaagactaggatgctgcaaagaaagatgctctgatacccaaaagccaaaacataagaccagggggcgaagagtcacatgcgggagacagacaggaagttaaactagtgcagcttacacgggcgatttagaaagatgttaagacacacactagattcaaatgaaacccatccgggtcccttcctccagaaagacgttgtaatgcggaaagccaaaatactacatcctctgggtagtcagccactgttcgtatttcaacctttaaatactagcggggtgtcccctataaaacaaggcatataactttggcgttatccaaaaaaatgcaatcctatagtggngaatctgggaaaatttttgttttccccaatatctattggttccagaagatcgtggactgatatggtgtgcccacaaaagatcttggtcccgtggaaaaaaattcgacaggggttttacgccgcctaataagagcgacccatgtgaaagggattacaagaggaaaaaatagcacgctcgtacaacaaaacaactggtggtgaaacacaccaacatgtggtgtggtcagaaacaccaagaagcgagaggcagtacagtcatgagtcatccccccctccttcttctctcttatgttttttatctgtgtgagagagggggggggggtg

SEQ ID NO: 239 - protein, 212 aa, Homo sapiens
MNIFRLTGDLSHLAAIVILLLKIWKTRSCAGISGKSQLLFALVFTTRYLDLFTSFISLYNTSMKVIYLACSYATVYLIYLKFKATYDGNHDTFRVEFLVVPVGGLSFLVNHDFSPLEILWTFSIYLESVAILPQLFMISKTGEAETITTHYLFFLGLYRALYLVNWIWRFYFEGFFDLIAVVAGVVQTILYCDFFYLYITKVLKGKKLSLPA

SEQ ID NO: 240 - DNA, 3465 bp, Homo sapiens
ctcgcgccaggcgagtctccgcgtctccctcgcgaactcggtgaaaggaattggcgccgttcgacaccaggcggatccgctctgcagcacgaacccatctccagccgcagccgcagccgccgcccgggccgaggagcagccgcagcagccgccaccagtggccgagtgagcggagccgagtttgaggcagcgcctagcggtgaatcggggccctcaccatgagttcctcgcctgttaatgtaaaaaagctgaaggtgtcggagctgaaagaggagctcaagaagcgacgcctttctgacaagggtctcaaggccgagctcatggagcgactccaggctgcgctggacgacgaggaggccgggggccgccccgccatggagcccgggaacggcagcctagacctgggcggggattccgctgggcgctcgggagcaggcctcgagcaggaggccgcggccggcggcgatgaagaggaggaggaagaggaagaggaggaggaaggaatctccgctctggacggcgaccagatggagctaggagaggagaacggggccgcgggggcggccgactcgggcccgatggaggaggaggaggccgcctcggaagacgagaacggcgacgatcagggtttccaggaaggggaagatgagctcggggacgaagaggaaggcgcgggcgacgagaacgggcacggggagcagcagcctcaaccgccggcgacgcagcagcaacagccccaacagcagcgcggggccgccaaggaggccgcggggaagagcagcggccccacctcgctgttcgcggtgacggtggcgccgcccggggcgaggcagggccagcagcaggcgggaggggacggcaaaacagaacagaaaggcggagataaaaagaggggtgttaaaagaccacgagaagatcatggccgtggatattttgagtacattgaagagaacaagtatagcagagccaaatctcctcagccacctgttgaagaagaagatgaacacttcgatgacacagtggtttgtcttgatacttataattgtgatctacattttaaaatatcaagagatcgtctcagtgcttcttcccttacaatggagagttttgcttttctttgggctggaggaagagcatcctatggtgtgtcaaaaggcaaagtgtgttttgagatgaaggttacagagaagatcccagtaaggcatttatatacaaaagatattgacatacatgaagttcgtattggctggtcactaactacaagtggaatgttacttggtgaagaagaattttcttatgggtattctctaaaaggaataaaaacatgcaactgtgagactgaagattatggagaaaagtttgatgaaaatgatgtgattacatgttttgctaactttgaaagtgatgaagtagaactctcgtatgctaagaatggacaagatcttggcgttgccttcaaaatcagtaaggaagttcttgctggacggccactgttcccgcatgttctctgccacaactgtgcagttgaatttaattttggtcagaaggaaaagccatattttccaatacctgaagagtatactttcatccagaacgtccccttagaggatcgagttagaggaccaaaggggcctgaagagaagaaagattgtgaagttgtgatgatgattggcttgccaggagctggaaaaactacctgggttactaaacatgcagcagaaaatccagggaaatataacattcttggcacaaatactattatggataagatgatggtggcaggttttaagaagcaaatggcagatactggaaaactgaacacactgttgcagagagccccccagtgtcttgggaaatttattgagattgctgcccgaaagaagcgaaattttattctggatcagacaaatgtgtctgctgctgcccagaggagaaaaatgtgcctgtttgcaggcttccagcgaaaagctgttgtagtttgcccaaaagatgaagactataagcaaagaacacagaagaaagcagaagtagaggggaaagacctaccagaacatgcggtcctcaaaatgaaaggaaactttaccctcccagaggtagctgagtgctttgatgaaataacctatgttgaacttcagaaggaagaagcccaaaaactcttggagcaatataaggaagaaagcaaaaaggctcttccaccagaaaagaaacagaacactggctcaaagaaaagcaataaaaataagagtggcaagaaccagtttaacagaggtggtggccatagaggacgtggaggattcaatatgcgtggtggaaatttcagaggaggagcccctgggaatcgtggcggatataataggaggggcaacatgccacagagaggtggtggcggtggaggaagtggtggaatcggctatccataccctcgtgcccctgtttttcctggccgtggtagttactcaaacagagggaactacaacagaggtggaatgcccaacagagggaactacaaccagaacttcagaggacgaggaaacaatcgtggctacaaaaatcaatctcagggctacaaccagtggcagcagggtcaattctggggtcagaagccatggagtcagcattatcaccaaggatattattgaatacccaaataaaacgaactgatacatatttctccaaaaccttcacaagaagtcgactgttttctttagtaggctaactttttaaacattccacaagaggaagtgcctgcgggttccttttttagaagctttgtgggttgattttttttcttttcttttttgtacatttttaattgcagtttaaaagtgaatcgtaagagaacctcagcattgtgcacgataagagaatgtgtcagtatttcagggttctacattttatctgtaaaatgtgacttttttttttttttatcacaacagaagtaaaatgttgctttgtacctggtgtcttttattaagaatttactccccccatttctcacagagaataacagtcgggagtcattgtcacaatataatagaaatgttagcaaccagattcatgtaaggactaagtggtcctcatgaattgcattaagactctgtactgctcatattacactccatcctctctgtagtttgctgggtagtggagggggtaagctaaatcatagtttctgacaataactgggaaggttttttcttaaaataacaatggaattggtataattgggattgaaaactaaaacttggaactaagatagagaagatggagtgtatgtagaagggctgttaaaaatgtaaaacttggttgcattatttgtggaggctcaaacttgtgaaggttaataccataatttttccatttgttctgcattttgattctgaaaagaaagctggctttgcccatttcttattaaaaaaacttgttgtaaaaaaaaaaaaaaaaaaaaaaaaaaaaaaaaaaaaa

SEQ ID NO: 241 - protein, 806 aa, Homo sapiens
MSSSPVNVKKLKVSELKEELKKRRLSDKGLKAELMERLQAALDDEEAGGRPAMEPGNGSLDLGGDSAGRSGAGLEQEAAAGGDEEEEEEEEEEEGISALDGDQMELGEENGAAGAADSGPMEEEEAASEDENGDDQGFQEGEDELGDEEEGAGDENGHGEQQPQPPATQQQQPQQQRGAAKEAAGKSSGPTSLFAVTVAPPGARQGQQQAGGDGKTEQKGGDKKRGVKRPREDHGRGYFEYIEENKYSRAKSPQPPVEEEDEHFDDTVVCLDTYNCDLHFKISRDRLSASSLTMESFAFLWAGGRASYGVSKGKVCFEMKVTEKIPVRHLYTKDIDIHEVRIGWSLTTSGMLLGEEEFSYGYSLKGIKTCNCETEDYGEKFDENDVITCFANFESDEVELSYAKNGQDLGVAFKISKEVLAGRPLFPHVLCHNCAVEFNFGQKEKPYFPIPEEYTFIQNVPLEDRVRGPKGPEEKKDCEVVMMIGLPGAGKTTWVTKHAAENPGKYNILGTNTIMDKMMVAGFKKQMADTGKLNTLLQRAPQCLGKFIEIAARKKRNFILDQTNVSAAAQRRKMCLFAGFQRKAVVVCPKDEDYKQRTQKKAEVEGKDLPEHAVLKMKGNFTLPEVAECFDEITYVELQKEEAQKLLEQYKEESKKALPPEKKQNTGSKKSNKNKSGKNQFNRGGGHRGRGGFNMRGGNFRGGAPGNRGGYNRRGNMPQRGGGGGGSGGIGYPYPRAPVFPGRGSYSNRGNYNRGGMPNRGNYNQNFRGRGNNRGYKNQSQGYNQWQQGQFWGQKPWSQHYHQGYY

SEQ ID NO: 242 - DNA, 1113 bp, Homo sapiens
ggggcgacgtttagcgactattgcgcctgcgccagcgccggctgcgagactggggccgtggctgctggtcccgggtgatgctaggcggctccctgggctccaggctgttgcggggtgtaggtgggagtcacggacggttcggggcccgaggtgtccgcgaaggtggcgcagccatggcggcaggggagagcatggctcagcggatggtctgggtggacctggagatgacaggattggacattgagaaggaccagattattgagatggcctgtctgataactgactctgatctcaacattttggctgaaggtcctaacctgattataaaacaaccagatgagttgctggacagcatgtcagattggtgtaaggagcatcacgggaggtctggccttaccaaggcagtgaaggagagtacaattacattgcagcaggcagagtatgaatttctgtcctttgtacgacagcagactcctccagggctctgtccacttgcaggaaattcagttcatgaagataagaagtttcttgacaaatacatgccccagttcatgaaacatcttcattatagaataattgatgtgagcactgttaaagaactgtgcagacgctggtatccagaagaatatgaatttgcaccaaagaaggctgcttctcatagggcacttgatgacattagtgaaagcatcaaagagcttcagttttaccgaaataacatcttcaagaaaaaaatagatgaaaagaagaggaaaattatagaaaatggggaaaatgagaagaccgtgagttgatgccagttatcatgctgccactacatcgttatctggaggcaacttctggtggtttttttttctcacgctgatggcttggcagagcaccttcggttaacttgcatctccagattgattactcaagcagacagcacacgaaatactatttttctcctaatatgctgtttccattatgacacagcagctcctttgtaagtaccaggtcatgtccatcccttggtacatatatgcatttgcttttaaaccatttcttttgtttaaataaataaataagtaaataaagctagttctattgaaatgcaaaaaaaaaaaaaaaaaaaaa

SEQ ID NO: 243 - protein, 237 aa, Homo sapiens
MLGGSLGSRLLRGVGGSHGRFGARGVREGGAAMAAGESMAQRMVWVDLEMTGLDIEKDQIIEMACLITDSDLNILAEGPNLIIKQPDELLDSMSDWCKEHHGRSGLTKAVKESTITLQQAEYEFLSFVRQQTPPGLCPLAGNSVHEDKKFLDKYMPQFMKHLHYRIIDVSTVKELCRRWYPEEYEFAPKKAASHRALDDISESIKELQFYRNNIFKKKIDEKKRKIIENGENEKTVS

SEQ ID NO: 244 - DNA, 593 bp, Homo sapiens
taaaaatatacagttttaatagaaatattaaaataatcattacacttcctctcattgcagaaaccatgaaagaatatgccttttgtaatcaaagtaattttttatcatgcaaaaaagtattttgttatgacattcgtaagtggagactgtatttcaaaacaagtttatacagacttcaaaaggtctaaagtcaaagtgaaatatatttaaatatgattagttacatctaatgcagctggcatactcatattcacagtttataaagtaaaaaaactaaactcttcatgtcggctctgaaatagatgcattttcattcatacattcgctagttaggtctgttcttctaaggaggaaagacgagatatatgaggtattttttaaagaacaaactcaacatatcagcagcaaatttcagttaaactaaattggaaaccaatgttctgtgtaaccaaagtgcaaagtcagttccccagctcagaaagaaaattaagagtataaactgaaggcttaagagaacttcagagagcacactgtgtgattaatacataaatattaaaaattatccaatttttgatttaagaacaacacagttg

SEQ ID NO: 245 - protein, 1583 aa, Homo sapiens
MKQEVEDSVTKMGDAHKELEQSHINYVKEIENLKNELMAVRSKYSEDKANLQKQLEEAMNTQLELSEQLKFQNNSEDNVKKLQEEIEKIRPGFEEQILYLQKQLDATTDEKKETVTQLQNIIEANSQHYQKNINSLQEELLQLKAIHQEEVKELMCQIEASAKEHEAEINKLNELKENLVKQCEASEKNIQKKYECELENLRKATSNANQDNQICSILLQENTFVEQVVNEKVKHLEDTLKELESQHSILKDEVTYMNNLKLKLEMDAQHIKDEFFHEREDLEFKINELLLAKEEQGCVIEKLKSELAGLNKQFCYTVEQHNREVQSLKEQHQKEISELNETFLSDSEKEKLTLMFEIQGLKEQCENLQQEKQEAILNYESLREIMEILQTELGESAGKISQEFESMKQQQASDVHELQQKLRTAFTEKDALLETVNRLQGENEKLLSQQELVPELENTIKNLQEKNGVYLLSLSQRDTMLKELEGKINSLTEEKDDFINKLKNSHEEMDNFHKKCEREERLILELGKKVEQTIQYNSELEQKVNELTGGLEETLKEKDQNDQKLEKLMVQMKVLSEDKEVLSAEVKSLYEENNKLSSEKKQLSRDLEVFLSQKEDVILKEHITQLEKKLQLMVEEQDNLNKLLENEQVQKLFVKTQLYGFLKEMGSEVSEDSEEKDVVNVLQAVGESLAKINEEKCNLAFQRDEKVLELEKEIKCLQEESVVQCEELKSLLRDYEQEKVLLRKELEEIQSEKEALQSDLLEMKNANEKTRLENQNLLIQVEEVSQTCSKSEIHNEKEKCFIKEHENLKPLLEQKELRDRRAELILLKDSLAKSPSVKNDPLSSVKELEEKIENLEKECKEKEEKINKIKLVAVKAKKELDSSRKETQTVKEELESLRSEKDQLSASMRDLIQGAESYKNLLLEYEKQSEQLDVEKERANNFEHRIEDLTRQLRNSTLQCETINSDNEDLLARIETLQSNAKLLEVQILEVQRAKAMVDKELEAEKLQKEQKIKEHATTVNELEELQVQLQKEKKQLQKTMQELELVKKDAQQTTLMNMEIADYERLMKELNQKLTNKNNKIEDLEQEIKIQKQKQETLQEEITSLQSSVQQYEEKNTKIKQLLVKTKKELADSKQAETDHLILQASLKGELEASQQQVEVYKIQLAEITSEKHKIHEHLKTSAEQHQRTLSAYQQRVTALQEECRAAKAEQATVTSEFESYKVRVHNVLKQQKNKSMSQAETEGAKQEREHLEMLIDQLKIKLQDSQNNLQINVSELQTLQSEHDTLLERHNKMLQETVSKEAELREKLCSIQSENMMMKSEHTQTVSQLTSQNEVLRNSFRDQVRHLQEEHRKTVETLQQQLSKMEAQLFQLKNEPTTRSPVSSQQSLKNLRERRNTDLPLLDMHTVTREEGEGMETTDTESVSSASTYTQSLEQLLNSPETKLEPPLWHAEFTKEELVQKLSSTTKSADHLNGLLRETEATNAILMEQIKLLKSEIRRLERNQEREKSAANLEYLKNVLLQFIFLKPGSERERLLPVINTMLQLSPEEKGKLAAVAQGEEENASRSSGWASYLHSWSGLR

SEQ ID NO: 246 - DNA, 2221 bp, Homo sapiens
tgctgaggactgtggcaagaccttccggtgcacatgcggctgtccctacgccagtagaacagcactgcagtctcacatctaccgaactgggcacgagatacctgcagaacacagggacccacctagtaagaaaaggaaaatggaaaactgtgcacaaaaccagaagttatccaacaagaccattgaatcattgaacaaccaaccaatccctagaccagacactcaagaactagaagcttcagaaataaagctagaaccatcttttgaagactcttgtggctctaacactgacaagcagactcttacaacaccaccgagatatcctcagaagttgcttttaccaaagcccaaagtggctttggttaaactacccgtgatgcagttttctgtcatgcctgtctttgtgcctacagccgactcctcagcccagcctgtggtgttaggtgttgatcagggctctgccacaggggctgtgcacttaatgtccttgtcagtaggaaccctgatcctcggcctagattcagaggcttgctctcttaaggagagcctacctcttttcaaaattagggctgaagcggcggcggcggtggggactgcacgtagcccggcgctcggcatggctctcctggtgctcggtctggtgagctgtaccttctttctggcagtgaatggtctgtattcctctagtgatgatgtgatcgaattaactccatcaaatttcaaccgagaagttattcagagtgatagtttgtggcttgtagaattctatgctccatggtgtggtcactgtcaaagattaacaccagaatggaagaaagcagcaactgcattaaaagatgttgtcaaagttggtgcagttgatgcagataagcatcattccctaggaggtcagtatggtgttcagggatttcctaccattaagatttttggatccaacaaaaacagaccagaagattaccaaggtggcagaactggtgaagccattgtagatgctgcgctgagtgctctgcgccagctcgtgaaggatcgcctcgggggacgaagcggaggatacagttctggaaaacaaggcagaagtgatagttcaagtaagaaggatgtgattgagctgacagacgacagctttgataagaatgttctggacagtgaagatgtttggatggttgagttctatgctccttggtgtggacactgcaaaaacctagagccagagtgggctgccgcagcttcagaagtaaaagagcagacgaaaggaagagtgaaactggcagctgtggatgctacagtcaatcaggttctggcctcccgatacgggattagaggatttcctacaatcaagatatttcagaaaggcgagtctcctgtggattatgacggtgggcggacaagatccgacatcgtgtcccgggcccttgatttgttttctgataacgccccacctcctgagctgcttgagattatcaacgaggacattgccaagaggacgtgtgaggagcaccagctctgtgttgtggctgtgctgccccatatccttgatactggagctgcaggcagaaattcttatctggaagttcttctgaagttggcagacaaatacaaaaagaaaatgtgggggtggctgtggacagaagctggagcccagtctgaacttgagaccgcgttggggattggagggtttgggtaccccgccatggccgccatcaatgcacgcaagatgaaatttgctctgctaaaaggctccttcagtgagcaaggcatcaacgagtttctcagggagctctcttttgggcgtggctccacggcacctgtaggaggcggggctttccctaccatcgttgagagagagccttgggacggcagggatggcgagcttcccgtggaggatgacattgacctcagtgatgtggagcttgatgacttagggaaagatgagttgtgagagccacaacagaggcttcagaccattttcttttcttgggagccagtggatttttccagcagtgaagggacattctctacactcagatgactctaccagtggccttttaaccaagaagtagtacttgattggtcatttgaaaacactgcaacagtgaacttttgcatctcaagaaaacattgaaaaattctatgaattgttgtagccggtgaattgagtcgtattctgtcacataatattttgaagaaaacttggctgtcgaaacaaaaaaaaaaaaaaaaa

SEQ ID NO: 247 - protein, 440 aa, Homo sapiens
MALLVLGLVSCTFFLAVNGLYSSSDDVIELTPSNFNREVIQSDSLWLVEFYAPWCGHCQRLTPEWKKAATALKDVVKVGAVDADKHHSLGGQYGVQGFPTIKIFGSNKNRPEDYQGGRTGEAIVDAALSALRQLVKDRLGGRSGGYSSGKQGRSDSSSKKDVIELTDDSFDKNVLDSEDVWMVEFYAPWCGHCKNLEPEWAAAASEVKEQTKGKVKLAAVDATVNQVLASRYGIRGFPTIKIFQKGESPVDYDGGRTRSDIVSRALDLFSDNAPPPELLEIINEDIAKRTCEEHQLCVVAVLPHILDTGAAGRNSYLEVLLKLADKYKKKMWGWLWTEAGAQSELETALGIGGFGYPAMAAINARKMKFALLKGSFSEQGINEFLRELSFGRGSTAPVGGGAFPTIVEREPWDGRDGELPVEDDIDLSDVELDDLGKDEL

SEQ ID NO: 248 - DNA, 991 bp, Homo sapiens
ttttattgtctcaaaggggcagggctgagggagggagctgaggagcaacatccccccaggccccaaggacacacacactctgtccttcccatgggccatggctctgggagcracccaaagaagggagaggaggctcaaactgcccccaggccccagggttctcaggtcagggagttagggaggaamatgaaagtgacatgcttcttaratamatcagcggctgtaacmacagggctgagggggcctccttgctctggagggggtcttcgtccatccttggtgggggggggtgcccagccccttttcaggcctaagaamagtctctaagagggtcaggagaactgggcagccgctaggacagcgtactamaccccggacaggcaggtgagccacaggcttgtcamarammaaataaaaaaaaacgcamaaaaacgcgcamamamamamacamamacacaaagagtgcaattgagagccttgggccaggacgctaraagatagggatgtagttgtcgattttggcgcggtggcgctgggcgatacattcagcgatccacacgatgttgcgacactcctgctccttgagcttcacgaaggcataraagacaccaaagtggaactggttcaggaaggccaacttgttcagctttacctcgtgctcaaagaatcggtcctccagcgtcttgtctccagggttgctacctgcaccctcgaagagcagcttgtactccgggtagtaatcggccacgttcttgacctgttcatagtcgtcagcccgagccagctgcgccaggccctcagggtagagccgcccacagtgtggaaagagcttggcacggtcctctttggacagctctgtgccgaaagaattgatggtgatgatgaaggcgcggcggtctgcttcaaactccaggatggggcacatggcatcagccgtagtcccgcccagtagggtgcagaacttgtagaaggactccaggtaggscttgta

SEQ ID NO: 249 - protein, 351 aa, Homo sapiens
MSFFPELYFNVDNGYLEGLVRGLKAGVLSQADYLNLVQCETLEDLKLHLQSTDYGNFLANEASPLTVSVIDDRLKEKMVVEFRHMRNHAYEPLASFLDFITYSYMIDNVILLITGTLHQRSIAELVPKCHPLGSFEQMEAVNIAQTPAELYNAILVDTPLAAFFQDCISEQDLDEMNIEIIRNTLYKAYLESFYKFCTLLGGTTADAMCPILEFEADRRAFIITINSFGTELSKEDRAKLFPHCGRLYPEGLAQLARADDYEQVKNVADYYPEYKLLFEGAGSNPGDKTLEDRFFEHEVKLNKLAFLNQFHFGVFYAFVKLKEQECRNIVWIAECIAQRHRAKIDNYIPIF

SEQ ID NO: 250 - DNA, 2402 bp, Homo sapiens
aaataaagaagggaaagtgctgagggtgacggccccggggagcgctgcggctctacgtcaacctgcggcggccgccgactcatttggggccacgctggttgcattcgtcacgccggcgatgcctctcaaacccgcggcctgccgaggacgttcccacacgggagaccccagcgacgcgggcgcatctgtggctctcgagaaccgggccgcggagccgccgcgagcgcaagcgaggaatcggcgactgcgggggtggacagctggggcttgtagtcccctcgctaccctctattctggaagaggcgggtcgcggccgctgaactccagctctgcgcctgcccaggcggccgcacgctcaggggcgtggcatgggtgggtcgtgagttgggcggggcccacagggcgtgcgcgacgcagcggcgcggcgcgtggcgtaaggggcgtggcgccagtgggcgtggcgtggcgcagtgcgaagggacgcggtgcgcatgcgcgtgagggctgccgcgggtgggtggtatcgaggcctgtcgggtcagggcggttcgcgggtgctgtcagagctgggccggggcccctaggcagggtagccgggtcgtagaggcgggggccggtcgcggtcggtggagcgggatgaggatgtaggaggggcggacgtggcggaagccgcggggtccgcggggtcggtgcctctagggagccagggaggcctttcccgaggctcctggggaagaagaggcgaagcgagagtccctggggaacccccactccactcccagctggagactgggttgtgtctgcatggaccagagcccacagtgcgagttgctataggcaaccagccagggtggccagctccttcccgtttgcccgtgatgttctggttttgggaccaaagcatcctaggcctccagcccactgcagtgaccgaattctgcgccccctgcccatcttctcccgcagcttccctagattaggcttgggaggcaagaggaggcctcctgacctttcacactgcctttttaatattaagatgaagtcacactccacaactttcttccagccaggcccagacatgtccgtccttgtaagttaaaagcttccatgggagccttccttcctaatcaagatgcaaataatacggcactccgaacagacactaaaaacagctctcatctcaaagaacccagtgcttgtatcacagtatgagaaattagatgctggggaacaacgtttaatgaatgaagccttccagccagccagtgatctctttggacccattaccttgcattctccatcagattggatcacctcccaccctgaggctccccaagactttgaacagttcttcagtgatccttacagaaagacaccctctccaaacaaacgcagcatttatatacagtccattggctctctaggaaacaccagaattatcagtgaagaatatattaaatggctcacgggctactgtaaagcatatttctatggcttgagagtaaaactcctagaaccagttcctgtttctgtaacaagatgttcctttagagtcaatgagaacacacacaacctacaaattcatgcaggggacatcctgaagttcttgaaaaagaaaaaacctgaagatgccttctgtgttgtgggaataacaatgattgatctttacccaagagactcgtggaattttgtctttggacaggcctctttgacagatggtgtggggatattcagctttgccaggtatggcagtgatttttatagcatgcactataaaggcaaagtgaagaagctcaagaaaacatcttcaagtgactattcaattttcgacaactattatattccagaaataactagtgttttactacttcgatcctgtaagactttaacccatgagatcggacacatatttggactgcgacactgccagtggcttgcatgcctcatgcaaggctccaaccacttggaagaagctgaccggcgccctctaaacctttgccctatctgtttgcacaagttgcagtgtgctgttggcttcagcattgtagaaagatacaaagcactggtgaggtggattgatgatgaatcttctgacacacctggagcaactccagaacacagtcacgaggataatgggaatttaccgaaacccgtggaagcctttaaggaatggaaagagtggataataaaatgcctggctgttctccaaaaatgaggaccttcaaataggagtgattgaaataaataactacttgcatgttatgctttcatttgggtggaatacttcattggaataaactactgatcttgtgctgtgtcaaagtaacagactagaaccttctttcaagtacctgaattgaaatgaaactcattttgaataataaaaactctagaaactcttt

SEQ ID NO: 251 - protein, 360 aa, Homo sapiens
MQIIRHSEQTLKTALISKNPVLVSQYEKLDAGEQRLMNEAFQPASDLFGPITLHSPSDWITSHPEAPQDFEQFFSDPYRKTPSPNKRSIYIQSIGSLGNTRIISEEYIKWLTGYCKAYFYGLRVKLLEPVPVSVTRCSFRVNENTHNLQIHAGDILKFLKKKKPEDAFCVVGITMIDLYPRDSWNFVFGQASLTDGVGIFSFARYGSDFYSMHYKGKVKKLKKTSSSDYSIFDNYYIPEITSVLLLRSCKTLTHEIGHIFGLRHCQWLACLMQGSNHLEEADRRPLNLCPICLHKLQCAVGFSIVERYKALVRWIDDESSDTPGATPEHSHEDNGNLPKPVEAFKEWKEWIIKCLAVLQK

SEQ ID NO: 252 - DNA, 1971 bp, Homo sapiens
gccgtgtccatggagagaagctgaggcggccgaccttcggcccgaggcaccggggcgccgggacggcgaagatgtcggcttccttagtccgggcaactgtccgggctgtgagcaagaggaagctgcagcccacccgggcagccctcaccctgacaccttcagcagtaaacaagataaaacaacttcttaaagataagcctgagcatgtaggtgtaaaagttggtgtccgaaccaggggctgtaatggcctttcttatactctagaatatacaaagacaaaaggagattctgatgaagaagttattcaagatggagtcagagtattcatcgaaaagaaagcacagctaacacttttaggaacagaaatggactatgttgaagacaaattatccagtgagtttgtgttcaataacccaaacatcaaagggacttgtggctgtggagaaagctttaatatttgaaatctcaggactcttctggccgtaggttccaggaaagctcgtggaagctttggggctcactgcagaaatcatgtgactgtcacgtgctggaaaataaagtgatacatcttgaaaatgaatccagtgtgttggattccagaagaaatgatatttatattctctataggggacagaaaatgagaagccatcactctttttggatcatttaggtctcttgtatcctttgttttagaaccagtttcattaaagttgccttcctgggcacctgtttatccatttcctgaactgtgtgcactccttagatcgctattgatggcttgatcatccctcagcatttctcccaaccagatcggtgactcctaaaatctgagacaggacatcgtgactgctggtagtaatatggtggtgcattgttttttccacccaaacttaacatagcctttttatacatttttatgaaaaatttcattgtcagctgcctcactgcatactctttaatagtaccaggcaaagattttcttcaactatagtacagattagttctgagtgatggtatcaaaaggtgagaaagacgtcatccgcctttttttaatccatttcttttgccaccctatatgtctgttcagagatgggctctcaagctgactttgattcttttagttgagaagtctcttaaagccatctagcccacctccctcaattccctatgtgaggaagcaaaaccccagggaagccaaagggctcctgtccaccctgacaccacaggccgggggagagtagggactctacccccctctccccttgtaggtgacacatgctctgccctctgaggcagtcagcgaaggcaaatggtctgacttctttatgtggtcaacattttgatagaatttctttataatttgatagagattatattatttttattttattttgagtgggaagaattttaaaacctttttatgtcaattaccatcttgtttctttcacctttgaaacaatgatttgtagcagagatgacattgtagcaacccagaattatgcttttggaatgtggtcctcactgtacaggagaatgtgtaatcttttgttaaaattcccagtgtgcatacattttctggttcctcggtccagttgctaaagttcttagtattttagcctaacatatttatcaccaacttttctttaaaagtgttccttttgtcacttagttactgattttcctgggtttgacataagtattctatgagatgatatatatgctttttttgaaagctgattctcatgaattcaagtagctgagttcctttatgtttcgtttattcactaaagtagctgacacaaaacacaccaaacctagagcggtagttttatgtaaatgctcatgagtttgtatcaataatataattgttgatccacttataattcgtgcaatactgtatgtatgtagagattgagttgtcaattaaaaaaaatgtggcctctttgtgatcataaaaaaaaaaaaaaaaaa

SEQ ID NO: 253 - protein, 129 aa, Homo sapiens
MSASLVRATVRAVSKRKLQPTRAALTLTPSAVNKIKQLLKDKPEHVGVKVGVRTRGCNGLSYTLEYTKTKGDSDEEVIQDGVRVFIEKKAQLTLLGTEMDYVEDKLSSEFVFNNPNIKGTCGCGESFNI

SEQ ID NO: 254 - DNA, 553 bp, Homo sapiens
gggcgagcatctcgcaggccgtaggaggaagatggcggtggagtcgcgcgttacccaggaggaaattaagaaggagccagagaaaccgatcgaccgcgagaagacatgcccactgttgctacgggtcttcaccaccaataacggccgccaccaccgaatggacgagttctcccggggaaatgtaccgtccagcgagttgcagatctacacttggatggatgcaaccttgaaagaactgacaagcttagtaaaagaagtctacccagaagctagaaagaagggcactcacttcaattttgcaatcgtttttacagatgttaaaagacctggctatcgagttaaggagattggcagcaccatgtctggcagagaggggactgatgattccatgaccctgcagtcgcagaagttccagataggagattacttggacatagcaattacccctccaaatcgggcaccacctccttcagggcgcatgagaccatattaaattctatttactatttgttgaatttatttttccgtcagttatgtaaaataaacatactct

SEQ ID NO: 255 - protein, 153 aa, Homo sapiens [sequence omitted]

SEQ ID NO: 256 - DNA, 2536 bp, Homo sapiens
agcgggtgcggggcgggaccggcccggcctatatattgggttggcgccggcgccagctgagccgagcggtagctggtctggcgaggttttatacacctgaaagaagagaatgtcaagacgaagtagccgtttacaagctaagcagcagccccagcccagccagacggaatccccccaagaagcccagataatccaggccaagaagaggaaaactacccaggatgtcaaaagaagtctggctaaacatgttaaaaaaggagagcagatatgttcatgacaaacattttgaagttctgcattctgacttggaaccacagatgaggtccatacttctagactggcttttagaggtatgtgaagtatacacacttcatagggaaacattttatcttgcacaagacttttttgatagatttatgttgacacaaaaggatataaataaaaatatgcttcaactcattggaattacctcattattcattgcttccaaacttgaggaaatctatgctcctaaactccaagagtttgcttacgtcactgatggtgcttgcagtgaagaggatatcttaaggatggaactcattatattaaaggctttaaaatgggaactttgtcctgtaacaatcatctcctggctaaatctctttctccaagttgatgctcttaaagatgctcctaaagttcttctacctcagtattctcaggaaacattcattcaaatagctcagcttttagatctgtgtattctagccattgattcattagagttccagtacagaatactgactgctgctgccttgtgccattttacctccattgaagtggttaagaaagcctcaggtttggagtgggacagtatttcagaatgtgtagattggatggtaccttttgtcaatgtagtaaaaagtactagtccagtgaagctgaagacttttaagaagattcctatggaagacagacataatatccagacacatacaaactatttggctatgctggaggaagtaaattacataaacaccttcagaaaagggggacagttgtcaccagtgtgcaatggaggcattatgacaccaccgaagagcactgaaaaaccaccaggaaaacactaaagaagataactaagcaaacaagttggaattcaccaagattgggtagaactggtatcactgaactactaaagttttacagaaagtagtgctgtgattgattgccctagccaattcacaagttacactgccattctgattttaaaacttacaattggcactaaagaatacatttaattatttcctatgttagctgttaaagaaacagcaggacttgtttacaaagatgtcttcattcccaaggttactggatagaagccaaccacagtctataccatagcaatgtttttcctttaatccagtgttactgtgtttatcttgataaactaggaattttgtcactggagttttggactggataagtgctaccttaaagggtatactaagtgatacagtactttgaatctagttgttagattctcaaaattcctacactcttgactagtgcaatttggttcttgaaaattaaatttaaacttgtttacaaaggtttagttttgtaataaggtgactaatttatctatagctgctatagcaagctattataaaacttgaatttctacaaatggtgaaatttaatgttttttaaactagtttatttgccttgccataacacattttttaactaataaggcttagatgaacatggtgttcaacctgtgctctaaacagtgggagtaccaaagaaattataaacaagataaatgctgtggctccttcctaactggggctttcttgacatgtaggttgcttggtaataacctttttgtatatcacaatttgggtgaaaaacttaagtaccctttcaaactatttatatgaggaagtcactttactactctaagatatccctaaggaatttttttttttaatttagtgtgactaaggctttatttatgtttgtgaaactgttaaggtcctttctaaattcctccattgtgagataaggacagtgtcaaagtgataaagcttaacacttgacctaaacttctattttcttaaggaagaagagtattaaatatatactgactcctagaaatctatttattaaaaaaagacatgaaaacttgctgtacataggctagctatttctaaatattttaaattagcttttctaaaaaaaaaatccagcctcataaagtagattagaaaactagattgctagtttattttgttatcagatatgtgaatctcttctccctttgaagaaactatacatttattgttacggtatgaagtcttctgtatagtttgtttttaaactaatatttgtttcagtattttgtctgaaaagaaaacaccactaattgtgtacatatgtattatataaacttaaccttttaatactgtttatttttagcccattgtttaaaaaataaaagttaaaaaaatttaactgcttaaaagtaaaaaaaaaaaaaaaaaaa

SEQ ID NO: 257 - protein, 296 aa, Homo sapiens
MSKEVWLNMLKKESRYVHDKHFEVLHSDLEPQMRSILLDWLLEVCEVYTLHRETFYLAQDFFDRFMLTQKDINKNMLQLIGITSLFIASKLEEIYAPKLQEFAYVTDGACSEEDILRMELIILKALKWELCPVTIISWLNLFLQVDALKDAPKVLLPQYSQETFIQIAQLLDLCILAIDSLEFQYRILTAAALCHFTSIEVVKKASGLEWDSISECVDWMVPFVNVVKSTSPVKLKTFKKIPMEDRHNIQTHTNYLAMLEEVNYINTFRKGGQLSPVCNGGIMTPPKSTEKPPGKH

SEQ ID NO: 258 - DNA, 1812 bp, Homo sapiens
gtgggtaggagcttgcttatagaaaagtggaatcgagtagtccttgctggtggagccgctgccgccagggaactcagggccggctcctgttccttcaagagtgctggaggccaaacttgaaatacaagtttaatgttcctcgtcgggcaaaagataaggatccgatctcccccggcccggtgtgcagcaggagcgaccaaccccgacccgggttaaaactcccagggactcttcgctgctgccacctcttgttctctcccccgttcccactcggggtctccctcagggccgggaggcacagcggtccctgcttgctgaggggctggatgtacgcatccgcaggttcccgcggacttgggggcgcccgctgagccccggcgcccgcagaagacttgtgtttgcctcctgcagcctcaacccggagggcagcgagggcctaccaccatgatcactggtgtgttcagcatgcgcttgtggaccccagtgggcgtcctgacctcgctggcgtactgcctgcaccagcggcgggtggccctggccgagctgcaggaggccgatggccagtgtccggtcgaccgcagcctgctgaagttgaaaatggtgcaggtcgtgtttcgacacggggctcggagtcctctcaagccgctcccgctggaggagcaggtagagtggaacccccagctattagaggtcccaccccaaactcagtttgattacacagtcaccaatctagctggtggtccgaaaccatattctccttacgactctcaataccatgagaccaccctgaaggggggcatgtttgctgggcagctgaccaaggtgggcatgcagcaaatgtttgccttgggagagagactgaggaagaactatgtggaagacattccctttctttcaccaaccttcaacccacaggaggtctttattcgttccactaacatttttcggaatctggagtccacccgttgtttgctggctgggcttttccagtgtcagaaagaaggacccatcatcatccacactgatgaagcagattcagaagtcttgtatcccaactaccaaagctgctggagcctgaggcagagaaccagaggccggaggcagactgcctctttacagccaggaatctcagaggatttgaaaaaggtgaaggacaggatgggcattgacagtagtgataaagtggacttcttcatcctcctggacaacgtggctgccgagcaggcacacaacctcccaagctgccccatgctgaagagatttgcacggatgatcgaacagagagctgtggacacatccttgtacatactgcccaaggaagacagggaaagtcttcagatggcagtaggcccattcctccacatcctagagagcaacctgctgaaagccatggactctgccactgcccccgacaagatcagaaagctgtatctctatgcggctcatgatgtgaccttcataccgctcttaatgaccctggggatttttgaccacaaatggccaccgtttgctgttgacctgaccatggaactttaccagcacctggaatctaaggagtggtttgtgcagctctattaccacgggaaggagcaggtgccgagaggttgccctgatgggctctgcccgctggacatgttcttgaatgccatgtcagtttataccttaagcccagaaaaataccatgcactctgctctcaaactcaggtgatggaagttggaaatgaagagtaactgatttataaaagcaggatgtgttgattttaaaataaagtgcctttatacaatgccaaaaaaaaaaaaaaaaaaaaaaaa

SEQ ID NO: 259 - protein, 428 aa, Homo sapiens
MITGVFSMRLWTPVGVLTSLAYCLHQRRVALAELQEADGQCPVDRSLLKLKMVQVVFRHGARSPLKPLPLEEQVEWNPQLLEVPPQTQFDYTVTNLAGGPKPYSPYDSQYHETTLKGGMFAGQLTKVGMQQMFALGERLRKNYVEDIPFLSPTFNPQEVFIRSTNIFRNLESTRCLLAGLFQCQKEGPIIIHTDEADSEVLYPNYQSCWSLRQRTRGRRQTASLQPGISEDLKKVKDRMGIDSSDKVDFFILLDNVAAEQAHNLPSCPMLKRFARMIEQRAVDTSLYILPKEDRESLQMAVGPFLHILESNLLKAMDSATAPDKIRKLYLYAAHDVTFIPLLMTLGIFDHKWPPFAVDLTMELYQHLESKEWFVQLYYHGKEQVPRGCPDGLCPLDMFLNAMSVYTLSPEKYHALCSQTQVMEVGNEE

SEQ ID NO: 260 - DNA, 1542 bp, Homo sapiens
tctgtactagaataggaaactgaggccctgagaattgactcattcagatcacttcccatgatcacgcagctgagcagtttccaatacagaattcagatttggggttccctacttcgaatccaggtctctgtgctccacacttgtctttcgtgctccatgtttgaagaaattaatattgtggaagaacagttttaaggcttagaggaacttgagttaggatccgtacttggcagatgaggaaattgattctcatggatgtaaattcactgtttgaggccacaacagggcatcatggtgggaggcttgaagaggaaacactctgatttggaagaggaggaggagaggtgggagtggagtccagcaggccttcagagctaccagcaagccctgctccgcatctccctagacaaagtccagcgcagcctgggcccccgagcacccagcctccgcaggcatgtcctcatccataacaccctccaacagctgcaggctgcacttcgcctggctcccgcccctgccctgccccccgagcccctcttcctgggcgaggaggatttctccctgtcagccaccattggctctatcctcagggagctggacacctccatggatgggactgagccccctcagaatccagtgactccccttggcctccagaatgaagtgccaccccagcctgatccagtcttcttagaagctctgagctcccggtacttgggggactctggcctggatgacttctttctggacattgacacatctgcggtagaaaaggagcctgcacgggccccaccagagcctcctcacaacctcttctgtgccccaggttcttgggagtggaatgaactggatcacatcatggaaatcattctggggtcctaaaactgtgatagaggggatcgatccttcctcatgtcatcttcggtggcctggatccctgaatgcaactctgggtgtgtgtttttgtgggggctcgaagcagtgactatggcctcctttgttcccatttcagggttccacaaactgtcttgcatgtgtgtgtgtgtctggttaccccgaccttctgtgaaggtgggtcttcctgaattaatttatctattccaaatgccttaacgagactctgtttctgggagtctgattttccacttacacatttcttccacctttcctgctagttcccactcccctgtgaccactggggcctcagggaagataaagaaagctgggcctgtcgaaggatgacagggatgtgctgccaggttgctatagaaacccaggctctgcctcttgcaccttgagggggtgggaggggctggtgtcctccctccaggctgaaccccacttcctcggcaggaccccagtctcagcagcctcctgatttcataaccaggccggaccacgtgcaatagggtggaaaccaaactgctccatgccgggttatttaaaagaaaggcagagtttgtggtggcttttttttttttttttggattgtttgtaatttttttaaataaaagtattttggaaggagaaaaaaaaaaaaaa

SEQ ID NO: 261 - protein, 196 aa, Homo sapiens
MVGGLKRKHSDLEEEEERWEWSPAGLQSYQQALLRISLDKVQRSLGPRAPSLRRHVLIHNTLQQLQAALRLAPAPALPPEPLFLGEEDFSLSATIGSILRELDTSMDGTEPPQNPVTPLGLQNEVPPQPDPVFLEALSSRYLGDSGLDDFFLDIDTSAVEKEPARAPPEPPHNLFCAPGSWEWNELDHIMEIILGS

SEQ ID NO: 262 - DNA, 503 bp, Homo sapiens
ctcatcagtttttaaattttatttaatttttatttattttttttttaaatgtaattttttcagagagataaggtcttgctatgttacccagcctagtcttgaactcctggcctcaagtgatcctcctgccttggcctcccatgctgctgggattacaggtgtgaactaccatgcccagccagctcctaagtcttaaggctctgtgttagtgatagatgtggccatggtgtaggcagtgcaatgtcttcgagtgagagtgaaggtggtaactcattgcatggattctagagttctgtttattctaatccaagttcttccacttaaaaacaatgttcttcctctcattgagtctcattcctcatctataggatgggaataagagcatgtacctggcaggttgttgtaaggattaaatggtgtaaacaaaatgtcaagtgcttgcaactttgaataccaaacttgagtgaaagctcaataaattgttacttaaaaaaaaaaaaaaa

SEQ ID NO: 263 - protein, 342 aa, Homo sapiens
MACEPQVDPGATGPLPPSSPGWSALPGGSPPGWGQELHNGQVLTVLRIDNTCAPISFDLGAAEEQLQTWGIQVPADQYRSLAESALLEPQVRRYIIYNSRPMRLAFAVVFYVVVWANIYSTSQMFALGNHWAGMLLVTLAAVSLTLTLVLVFERHQKKANTNTDLRLAAANGALLRHRVLLGVTDTVEGCQSVIQLWFVYFDLENCVQFLSDHVQEMKTSQESLLRSRLSQLCVVMETGVSPATAEGPENLEDAPLLPGNSCPNERPLMQTELHQLVPEAEPEEMARQLLAVFGGYYIRLLVTSQLPQAMGTRHTNSPRIPCPCQLIEAYILGTGCCPFLAR

SEQ ID NO: 264 - DNA, 990 bp, Homo sapiens
tgtkattcatacatttgsgttgatttatatacattacgtacaatttctacattgggttagaagaatgacacagggggcagcaacactctcgcagcccagcctccattccctgacactggaggcagggcctatggctggcagagggacggtgttccatgagtgccactcagaagcctcccccggcattctgggcccctggctcttccagagtccacattcaaggcaacctgagcacaggcttgagggagagtggagaaaggccaggaaagggtgcccacactcttgcctgccaggcccaggaccagctctctcctacactggacccaatttccttctgatcacagagctggtctggatcaagacaatgtggagatctggtgtggaggctgtggccaggtgaggcagccgggctccctgttagacccccaggctctcttgagcaccagatgggcactttaccaacaggtttgggtaaaaatgtctacagagagctatgcacacctgggtccccttctggctcctacagtcaaggggcaagtgttctctcgaacattgttcccaaggccagtgtccgagtcagctgcatgtgattgtcggggctgggattggggcaggcaggcgagctgtaccttcgtccacagggcatgcacatccagctctcagaaattcttcctgtcagccaggtggaagcccgggacaagtggactcttggtggctggactggaaggggaccggcggggaccagcctggaccagctgaccagagggctgcacatctctgctctgcagccgggcaagcagaggacatgcagccatagtcctcactccctttctttggttgtttttcaaaccttcaagatagttactttctgaggttgactgaccaatcgcaaggtgccagaattgtgaaatgtccagtagcacagggcatgaacacagctgccctccagacacagatggcacctttttactccycctgagscgtacttgc

SEQ ID NO: 265 - protein, 479 aa, Homo sapiens
MDETSPLVSPERAQPPDYTFPSGSGAHFPQVPGGAVRVAAAAGSGPSPPGSPGHDRERQPLLDRARGAAAQGQTQTVAAQAQALAAQAAAAAHAAQAHRERNEFPEDPEFEAVVRQAELAIERCIFPERIYQGSSGSYFVKDPQGRIIAVFKPKNEEPYGHLNPKWTKWLQKLCCPCCFGRDCLVLNQGYLSEAGASLVDQKLELNIVPRTKVVYLASETFNYSAIDRVKSRGKRLALEKVPKVGQRFNRIGLPPKVGSFQLFVEGYKDADYWLRRFEAEPLPENTNRQLLLQFERLVVLDYIIRNTDRGNDNWLIKYDCPMDSSSSRDTDWVVVKEPVIKVAAIDNGLAFPLKHPDSWRAYPFYWAWLPQAKVPFSQEIKDLILPKISDPNFVKDLEEDLYELFKKDPGFDRGQFHKQIAVMRGQILNLTQALKDNKSPLHLVQMPPVIVETARSHQRSSSESYTQSFQSRKPFFSWW

SEQ ID NO: 266 - DNA, 2722 bp, Homo sapiens
gagcgggctgagggtaggaagtagccgctccgagtggaggcgactgggggctgaagagcgcgccgccctctcgtcccactttccaggtgtgtgatcctgtaaaattaaatcttccaagatgatctggtatatattaattataggaattctgcttccccagtctttggctcatccaggcttttttacttcaattggtcagatgactgatttgatccatactgagaaagatctggtgacttctctgaaagattatattaaggcagaagaggacaagttagaacaaataaaaaaatgggcagagaagttagatcggctaactagtacagcgacaaaagatccagaaggatttgttgggcatccagtaaatgcattcaaattaatgaaacgtctgaatactgagtggagtgagttggagaatctggtccttaaggatatgtcagatggctttatctctaacctaaccattcagagaccagtactttctaatgatgaagatcaggttggggcagccaaagctctgttacgtctccaggatacctacaatttggatacagataccatctcaaagggtaatcttccaggagtgaaacacaaatcttttctaacggctgaggactgctttgagttgggcaaagtggcctatacagaagcagattattaccatacggaactgtggatggaacaagccctaaggcaactggatgaaggcgagatttctaccatagataaagtctctgttctagattatttgagctatgcggtatatcagcagggagacctggataaggcacttttgctcacaaagaagcttcttgaactagatcctgaacatcagagagctaatggtaacttaaaatattttgagtatataatggctaaagaaaaagatgtcaataagtctgcttcagatgaccaatctgatcagaaaactacaccaaagaaaaaaggggttgctgtggattacctgccagagagacagaagtacgaaatgctgtgccgtggggagggtatcaaaatgacccctcggagacagaaaaaactcttttgccgctaccatgatggaaaccgtaatcctaaatttattctggctccagctaaacaggaggatgaatgggacaagcctcgtattattcgcttccatgatattatttctgatgcagaaattgaaatcgtcaaagacctagcaaaaccaaggctgagccgagctacagtacatgaccctgagactggaaaattgaccacagcacagtacagagtatctaagagtgcctggctctctggctatgaaaatcctgtggtgtctcgaattaatatgagaatacaagatctaacaggactagatgtttccacagcagaggaattacaggtagcaaattatggagttggaggacagtatgaaccccattttgactttgcacggaaagatgagccagatgctttcaaagagctggggacaggaaatagaattgctacatggctgttttatatgagtgatgtgtctgcaggaggagccactgtttttcctgaagttggagctagtgtttggcccaaaaaaggaactgctgttttctggtataatctgtttgccagtggagaaggagattatagtacacggcatgcagcctgtccagtgctagttggcaacaaatgggtatccaataaatggctccatgaacgtggacaagaatttcgaagaccttgtacgttgtcagaattggaatgacaaacaggcttccctttttctcctattgttgtactcttatgtgtctgatatacacatttccatagtcttaactttcaggagtttacaattgactaacactccatgattgattcagtcatgaacctcatcccatgtttcatctgtggacaattgcttactttgtgggttcttttaaaagtaacacgaaatcatcatattgcataaaaccttaaagttctgttggtatcacagaagacaaggcagagtttaaagtgaggaattttatatttaaagaactttttggttggataaaaacataatttgagcatccagttttagtatttcactacatctcagttggtgggtgttaagctagaatgggctgtgtgataggaaacaaatgccttacagatgtgcctaggtgttctgtttacctagtgtcttactctgttttctggatctgaagactagtaataaactaggacactaactgggttccatgtgattgccctttcatatgatcttctaagttgatttttttcctcccaagtcttttttaaagaaagtatactgtattttaccaaccccctctcttttcttttagctcctctgtggtgaattaaacgtacttgagttaaaatatttcgattttttttttttttttaatggaaagtcctgcataacaacactgggccttcttaactaaaatgctcaccacttagcctgtttttttatcccttttttaaaatgacagatgattttgttcaggaattttgctgtttttcttagtgctaataccttgcctcttattcctgctacagcagggtggtaatattggcattctgattaaatactgtgccttaggagactggaagtttaaaaatgtacaagtcctttcagtgatgagggaattgattttttttaaaagtctttttcttagaaagccaaaatgtttgtttttttaagattctgaaatgtgttgtgacaacaatgacctatttatgatcttaaatctttttt

SEQ ID NO: 267 - protein, 534 aa, Homo sapiens
MIWYILIIGILLPQSLAHPGFFTSIGQMTDLIHTEKDLVTSLKDYIKAEEDKLEQIKKWAEKLDRLTSTATKDPEGFVGHPVNAFKLMKRLNTEWSELENLVLKDMSDGFISNLTIQRPVLSNDEDQVGAAKALLRLQDTYNLDTDTISKGNLPGVKHKSFLTAEDCFELGKVAYTEADYYHTELWMEQALRQLDEGEISTIDKVSVLDYLSYAVYQQGDLDKALLLTKKLLELDPEHQRANGNLKYFEYIMAKEKDVNKSASDDQSDQKTTPKKKGVAVDYLPERQKYEMLCRGEGIKMTPRRQKKLFCRYHDGNRNPKFILAPAKQEDEWDKPRIIRFHDIISDAEIEIVKDLAKPRLSRATVHDPETGKLTTAQYRVSKSAWLSGYENPVVSRINMRIQDLTGLDVSTAEELQVANYGVGGQYEPHFDFARKDEPDAFKELGTGNRIATWLFYMSDVSAGGATVFPEVGASVWPKKGTAVFWYNLFASGEGDYSTRHAACPVLVGNKWVSNKWLHERGQEFRRPCTLSELE

SEQ ID NO: 268 - DNA, 2339 bp, Homo sapiens
cctgtggtcccgggtttctgcagagtctacttcagaagcggaggcactgggagtccggtttgggattgccaggctgtggttgtgagtctgagcttgtgagcggctgtggcgccccaactcttcgccagcatatcatcccggcaggcgataaactacattcagttgagtctgcaagactgggaggaactggggtgataagaaatctattcactgtcaaggtttattgaagtcaaaatgtccaaaaaaatcagtggcggttctgtggtagagatgcaaggagatgaaatgacacgaatcatttgggaattgattaaagagaaactcatttttccctacgtggaattggatctacatagctatgatttaggcatagagaatcgtgatgccaccaacgaccaagtcaccaaggatgctgcagaagctataaagaagcataatgttggcgtcaaatgtgccactatcactcctgatgagaagagggttgaggagttcaagttgaaacaaatgtggaaatcaccaaatggcaccatacgaaatattctgggtggcacggtcttcagagaagccattatctgcaaaaatatcccccggcttgtgagtggatgggtaaaacctatcatcataggtcgtcatgcttatggggatcaatacagagcaactgattttgttgttcctgggcctggaaaagtagagataacctacacaccaagtgacggaacccaaaaggtgacatacctggtacataactttgaagaaggtggtggtgttgccatggggatgtataatcaagataagtcaattgaagattttgcacacagttccttccaaatggctctgtctaagggttggcctttgtatctgagcaccaaaaacactattctgaagaaatatgatgggcgttttaaagacatctttcaggagatatatgacaagcagtacaagtcccagtttgaagctcaaaagatctggtatgagcataggctcatcgacgacatggtggcccaagctatgaaatcagagggaggcttcatctgggcctgtaaaaactatgatggtgacgtgcagtcggactctgtggcccaagggtatggctctctcggcatgatgaccagcgtgctggtttgtccagatggcaagacagtagaagcagaggctgcccacgggactgtaacccgtcactaccgcatgtaccagaaaggacaggagacgtccaccaatcccattgcttccatttttgcctggaccagagggttagcccacagagcaaagcttgataacaataaagagcttgccttctttgcaaatgctttggaagaagtctctattgagacaattgaggctggcttcatgaccaaggacttggctgcttgcattaaaggtttacccaatgtgcaacgttctgactacttgaatacatttgagttcatggataaacttggagaaaacttgaagatcaaactagctcaggccaaactttaagttcatacctgagctaagaaggataattgtcttttggtaactaggtctacaggtttacatttttctgtgttacactcaaggataaaggcaaaatcaattttgtaatttgtttagaagccagagtttatcttttctataagtttacagcctttttcttatatatacagttattgccacctttgtgaacatggcaagggacttttttacaatttttattttattttctagtaccagcctaggaattcggttagtactcatttgtattcactgtcactttttctcatgttctaattataaatgaccaaaatcaagattgctcaaaagggtaaatgatagccacagtattgctccctaaaatatgcataaagtagaaattcactgccttcccctcctgtccatgaccttgggcacagggaagttctggtgtcatagatatcccgttttgtgaggtagagctgtgcattaaacttgcacatgactggaacgaagtatgagtgcaactcaaatgtgttgaagatactgcagtcatttttgtaaagaccttgctgaatgtttccaatagactaaatactgtttaggccgcaggagagtttggaatccggaataaatactacctggaggtttgtcctctccatttttctctttctcctcctggcctggcctgaatattatactactctaaatagcatatttcatccaagtgcaataatgtaagctgaatcttttttggacttctgctggcctgttttatttcttttatataaatgtgatttctcagaaattgatattaaacactatcttatcttctcctgaactgttgattttaattaaaattaagtgctaattaccaaaaaaaaaaa

SEQ ID NO: 269 - protein, 414 aa, Homo sapiens
MSKKISGGSVVEMQGDEMTRIIWELIKEKLIFPYVELDLHSYDLGIENRDATNDQVTKDAAEAIKKHNVGVKCATITPDEKRVEEFKLKQMWKSPNGTIRNILGGTVFREAIICKNIPRLVSGWVKPIIIGRHAYGDQYRATDFVVPGPGKVEITYTPSDGTQKVTYLVHNFEEGGGVAMGMYNQDKSIEDFAHSSFQMALSKGWPLYLSTKNTILKKYDGRFKDIFQEIYDKQYKSQFEAQKIWYEHRLIDDMVAQAMKSEGGFIWACKNYDGDVQSDSVAQGYGSLGMMTSVLVCPDGKTVEAEAAHGTVTRHYRMYQKGQETSTNPIASIFAWTRGLAHRAKLDNNKELAFFANALEEVSIETIEAGFMTKDLAACIKGLPNVQRSDYLNTFEFMDKLGENLKIKLAQAKL

SEQ ID NO: 270 - DNA, 1630 bp, Homo sapiens
actgctctgccggccactcctgcatctttaccgtcccagggacttccagttgctgccccttcccagaggccgtggcatgcggggatggccatcactgctgcccacggggcttccactgcagtgcagacgggcgatcctgcttccaaagatcaggtaacaactccgtgggtgccatccagtgccctgatagtcagttcgaatgcccggacttctccacgtgctgtgttatggtcgatggctcctgggggtgctgccccatgccccaggcttcctgctgtgaagacagggtgcactgctgtgtgtgacctgatccagagtaagtgcctctccaaggagaacgctaccacggacctcctcactaagctgcctgcgcacacagtgggggatgtgaaatgtgacatggaggtgagctgcccagatggctatacctgctgccgtctacagtcgggggcctggggctgctgcccttttacccaggctgtgtgctgtgaggaccacatacactgctgtcccgcggggtttacgtgtgacacgcagaagggtacctgtgaacaggggccccaccaggtgccctggatggagaaggccccagctcacctcagcctgccagacccacaagccttgaagagagatgtcccctgtgataatgtcagcagctgtccctcctccgatacctgctgccaactcacgtctggggagtggggctgctgtccaatcccagaggctgtctgctgctcggaccaccagcactgctgcccccagggctacacgtgtgtagctgaggggcagtgtcagcgaggaagcgagatcgtggctggactggagaagatgcctgcccgccgggcttccttatcccaccccagagacatcggctgtgaccagcacaccagctgcccggtggggcagacctgctgcccgagcctgggtgggagctgggcctgctgccagttgccccatgctgtgtgctgcgaggatcgccagcactgctgcccggctggctacacctgcaacgtgaaggctcgatcctgcgagaaagaagtggtctctgcccagcctgccaccttcctggcccgtagccctcacgtgggtgtgaaggacgtggagtgtggggaaggacacttctgccatgataaccagacctgctgccgagacaaccgacagggctgggcctgctgtccctaccgccagggcgtctgttgtgctgatcggcgccactgctgtcctgctggcttccgctgcgcagccaggggtaccaagtgtttgcgcagggaggccccgcgctgggacgcccctttgagggacccagccttgagacagctgctgtgagggacagtactgaagactctgcagccctcgggaccccactcggagggtgccctctgctcaggcctccctagcacctctccctaaccaaattctccctggaccccattctgagctccccatcaccatgggaggtggggcctcaatctaaggccttccctgtcagaagggggttgtggcaaaagccacattacaagctgccatcccctccccgtttcagtggaccctgtggccaggtgcttttccctatccacaggggtgtttgtgtgtgtgcgcgtgtgcgtttcaataaagtttgtacactttc

SEQ ID NO: 271 - protein, 413 aa, Homo sapiens
MAITAAHGASTAVQTGDPASKDQVTTPWVPSSALIVSSNARTSPRAVLWSMAPGGAAPCPRLPAVKTGCTAVCDLIQSKCLSKENATTDLLTKLPAHTVGDVKCDMEVSCPDGYTCCRLQSGAWGCCPFTQAVCCEDHIHCCPAGFTCDTQKGTCEQGPHQVPWMEKAPAHLSLPDPQALKRDVPCDNVSSCPSSDTCCQLTSGEWGCCPIPEAVCCSDHQHCCPQGYTCVAEGQCQRGSEIVAGLEKMPARRASLSHPRDIGCDQHTSCPVGQTCCPSLGGSWACCQLPHAVCCEDRQHCCPAGYTCNVKARSCEKEVVSAQPATFLARSPHVGVKDVECGEGHFCHDNQTCCRDNRQGWACCPYRQGVCCADRRHCCPAGFRCAARGTKCLRREAPRWDAPLRDPALRQLL

SEQ ID NO: 272 - DNA, 2415 bp, Homo sapiens
gcagcgcggagcccggctcggccacaccgatcgcccgccgccatgggctcctcgcaaagcgtcgagatcccgggcgggggcaccgagggctaccacgttctgcgggtacaagaaaattccccaggacacagagctggtttggagcctttctttgattttattgtttctattaatggttcaagattaaataaagacaatgacactcttaaggatctgctgaaagcaaacgttgaaaagcctgtaaagatgcttatctatagcagcaaaacattggaactgcgagagacctcagtcacaccaagtaacctgtggggcggccagggcttattgggagtgagcattcgtttctgcagctttgatggggcaaatgaaaatgtttggcatgtgctggaggtggaatcaaattctcctgcagcactggcaggtcttagaccacacagtgattatataattggagcagatacagtcatgaatgagtctgaagatctattcagccttatcgaaacacatgaagcaaaaccattgaaactgtatgtgtacaacacagacactgataactgtcgagaagtgattattacaccaaattctgcatggggtggagaaggcagcctaggatgtggcattggatatggttatttgcatcgaatacctacacgcccatttgaggaaggaaagaaaatttctcttccaggacaaatggctggtacacctattacacctcttaaagatgggtttacagaggtccagctgtcctcagttaatcccccgtctttgtcaccaccaggaactacaggaattgaacagagtctgactggactttctattagctcaactccaccagctgtcagtagtgttctcagtacaggtgtaccaacagtaccgttattgccaccacaagtaaaccagtccctcacttctgtgccaccaatgaatccagctactacattaccaggtctgatgcctttaccagcaggactgcccaacctccccaacctcaacctcaacctcccagcaccacacatcatgccaggggttggcttaccagaacttgtaaacccaggtctgccacctcttccttccatgcctccccgaaacttacctggcattgcacctctccccctgccatccgagttcctcccgtcattccccttggttccagagagctcttctgcagcaagctcaggagagctgctgtcttccctcccgcccaccagcaacgcaccctctgaccctgccacaactactgcaaaggcagacgctgcctcctcactcactgtggatgtgacgccccccactgccaaggcccccaccaccgttaggacagagtcggcgactccaccccagtcagcgagaagcctgtttctgcggctgtggatgccaatgcttctgagtcaccttaactttgaaccattctttggaattggcgtggtatatttaaccacgggagcgtgtctggaaacgcaaactatcattaatttcatactagtttgtaccgtatctgtaggcatcctgtaaataattccaaggggaaaactaaacgaggacgtgggttgtatcctgccaggttgagtggggctcacacgctagggtgagatgtcagaaagcgcttgtattttaaacaaccaaaaagaattgtaagggtggcttgctgccaggcttgcactgccgttcctgggggtgtgcatcttcgggaaaggtggtggcggggcgtccactaggtttcctgtcccctgctgctccttccgtaagaaaatgaaatattctatgcctaatactcacacgcaacatttcttgtactttgtaagtcgtttgcgagaatgcagaccacctcactaaactgtaaacggtaaagagatttttacttttggtctccgtgagtcgcatctctactaaggtttacacaggaattccacctgaagacttgtgttaaagttctacagcgcgcactgttaactgaacgtctttttcttcagcctatacgcggatccttgttttgagctctcagaatcactcagacaacattttgtaactgctgctgttgctttctacatacaccttataaagtgacatttcaaaagaaataaggtgccacagttttaaaccagaaggtggcactctgtggctccttgtagtattatagctatactgggaaagcatagatacagcaataaagtacagtaattttactttttttcttgtgttacatctaaattacaacccttaattgccacgtgtgcacttactactctccagtatgtcttattactctccagtatgtcacgcatctttaacttttcacgtcctatgtttgctttctcccatttttaagagatggtaagttaactggaattgatttactgaatgaaattaaatgcagatatccctgtttttgaaataaaaaaaaaaaaaaaaaaa

SEQ ID NO: 273 - protein, 452 aa, Homo sapiens; identical to SEQ ID NO: 201

SEQ ID NO: 274 - DNA, 578 bp, Homo sapiens
tttttttccaggcaaagtagaagcaatatattttgcaacaattattctttcaataaaggacttgtaaattctctcccacaccacgttagacaggtaagtgacgtcacttccaaatttcaactgttacataaaaaatccagaatgtcaacaccacttgcaatctccacaaggttacaaacaacacatacaccttcaattcaaaatacctgaatgaaaggtttcatcccaattatggggaaaaaacttcccatctcacaggctggttagaaactggttctgaatacagcgtaacatacacagcaattcagatcttaagaaactcaactgttgccagttaatacagtaagtagaactttattcagcttcacccttatttcatttttccatatatttaagtgatcctttctataccttttaaggtaagcaatcatctcaagattatcagacatctaaagaaaactttggtaaactggactatagtaatcgtatgagaaaaaaatagctcaagattcctaactgctacaagaatagtgttgatgggatcaaactcctaattatcctaatagacctaattcatt

SEQ ID NO: 275 - protein, 216 aa, Homo sapiens
MAAQGEPQVQFKLVLVGDGGTGKTTFVKRHLTGEFEKKYVATLGVEVHPLVFHTNRGPIKFNVWDTAGQEKFGGLRDGYYIQAQCAIIMFDVTSRVTYKNVPNWHRDLVRVCENIPIVLCGNKVDIKDRKVKAKSIVFHRKKNLQYYDISAKSNYNFEKPFLWLARKLIGDPNLEFVAMPALAPPEVVMDPALAAQYEHDLEVAQTTALPDEDDDL

SEQ ID NO: 276 - DNA, 494 bp, Homo sapiens
ggaaactgaggctcaggagagaggcgctccaggccgatgcagccaacaaaccggcgccctcttcacacgtagctcctcaggccattccccatgagtcccccacacccaccccatcctcggtctttgcaaagaagggcccgagcttagtttccccaggactggcctaggaaggagcaccggccacagctgctccccgtgccactcagggtggacccagcatctcaggagcacctcagggtgtcggttaagagacaggcctccacccctgcaccagagcctgctcttagctcccggtgcccccagaccccgcagctctgtgcccggcaagaagcagctagacacacgccagggcgccaagcacggccagctccgcggacccatggacaagcccagccccgcctcagggaaaacagggcctttccctacaggacacgccccagagctgtggcagattgcaggagccatcgtgtggggagaatttaataaaagccctt

SEQ ID NO: 277 - protein, 985 aa, Homo sapiens
MIRHAGAPARGDPTGPVPVVGKGEEEEEEDGMRLCLPANPKNCLPHRRGISILEKLIKTCPVWLQLSLGQAEVARILHRVVAGMFLVRRDSSSKQLVLCVHFPSLNESSAEVLEYTIKEEKSILYLEGSALVFEDIFRLIAFYCVSRDLLPFTLRLPQAILEASSFTDLETIANLGLGFWDSSLNPPQERGKPAEPPRDRAPGFPLVSSLRPTAHDANCACEIELSVGNDRLWFVNPIFIEDCSSALPTDQPPLGNCPARPLPPTSDATSPTSRWAPRRPPPPPPVLPLQPCSPAQPPVLPALAPAPACPLPTSPPVPAPHVTPHAPGPPDHPNQPPMMTCERLPCPTAGLGPLREEAMKPGAASSPLQQVPAPPLPAKKNLPTAPPRRRVSERVSLEDQSPGMAAEGDQLSLPPQGTSDGPEDTPRESTEQGQDTEVKASDPHSMPELPRTAKQPPVPPPRKKRISRQLASTLPAPLENAELCTQAMALETPTPGPPREGQSPASQAGTQHPPAQATAHSQSSPEFKGSLASLSDSLGVSVMATDQDSYSTSSTEEELEQFSSPSVKKKPSMILGKARHRLSFASFSSMFHAFLSNNRKLYKKVVELAQDKGSYFGSLVQDYKVYSLEMMARQTSSTEMLQEIRTMMTQLKSYLLQSTELKALVDPALHSEEELEAIVESALYKCVLKPLKEAINSCLHQIHSKDGSLQQLKENQLVILATTTTDLGVTTSVPEVPMMEKILQKFTSMHKAYSPEKKISILLKTCKLIYDSMALGNPGKPYGADDFLPVLMYVLARSNLTEMLLNVEYMMELMDPALQLGEGSYYLTTTYGALEHIKSYDKITVTRQLSVEVQDSIHRWERRRTLNKARASRSSVQDFICVSYLEPEQQARTLASRADTQAQALCAQCAEKFAVERPQAHRLFVLVDGRCFQLADDALPHCIKGYLLRSEPKRDFHFVYRPLDGGGGGGGGSPPCLVVREPNFL

SEQ ID NO: 278 - DNA, 114596 bp, Homo sapiens
gatcctaatgacccagtaattttcctccaagtccagtattctcaggattaagtcctaatcatccatctacccactcacccactcattcatccatctgtccatccatctatccatccatccattcatccactcacccatccattcatttacttattcatctattctcccattcacccatccatccacccacccacccacacatccacttatttacccacccatttcatccattcttccatccacccatctatccatctatctatccactcacctgtctatcaatccatccatccatttatccagccatccattcacccacccacccattcatctgtcctcaatccactcacccatccactcatttactcactcattcatctattctcccatccaccctttcatccactcacccaccatccatccatccatccatctacccatgcatccatccatccacccatccatccatccatccacccatctactcattgacccactcatttcacctattcttccatccacctatgtattcatccacccactcacccatctactcattcactcacccattcatctattctcccatctacccccattcatccaccagtccatccatccatccatgtaacatttactgaaggctcactacctgcctgcaaggttcaggtgagggacagagcaggactgtacaggtgtctctcagcctctaccctccctcattcctgcttccatcttcttctgatctgggataattcctctcctgggagatccaaggatgatggggagcaaaaggcggtggggtgaggggttggggcttcggcactgcctctctactgaggccccagtcccttctctgtatggacaaaatggaaacttgtggtttttcttcctgcattgaaccagcaggctgagctggggctgaactcctgggacattaaaagggggtgagaggtgaagatgcatccaggtggggggtgtgtgtgtgtgtgtgtgtgtgtgtgtgtgtgtgtgtgagagagagagagagagagagagagagagagagagaggaggtggagggcgaaaggcctgtgcatctctgtctctgtcaggcacacagagaatggcagtggtgagcctgcaatgtattgggaagacattattgtttgctcagaaatggccaagaaccccagctcctccctgccaggagacacaggattctgcgcctccaggcacaaccgtcttccctcccttccactttcctccctcctcctcaaacccttgcccaggtgccccccggctggctgggttcaccagaggatagatgaccacatactaatcccagcctcctgtggaggttagtcccaccctccaccgaggtggaaaattcctgcaggtagagtcagcagtggttcaagtcccaccgttgtccatgagatcggactacacagcacacacggccgcttttttttacctaccacgtgtcccacgtctcctacagtcctttaatccctgaccagtccttcagaggatggacacgctctgatctttgtagcctctctttctctcctcagggatcacacctcactgtagaccacagcccaatgtcccaggtgactcacttactagaatttgtaattcacttcatcctgccaccacgcccctgtgagctagacacccaaattgactccattttacagatttggagactgaggtgcagagagattaagtccctgtctgaggtcgcatggtggatgagcagcagacaccctggcgggcagcctggctcctgagccacgcgtcaccaccgtcttagtggaaaatcggccacaaggagggattccccttccagtctcctggcccttgccaaaggatccatactagacatgagaggaggaagggagtccacaccgagtctggcctcaaaccctcattccttaggaaactgcgctaatgtcgccccctccctccctgtgaccaccccaggttgtatctgcaccttcccagctagcccaggtgtcattacatatttatctgttgatcactcggctccagggactgccatatcggcccaggaagtcacgatcttgtctgtctggttaggggctgtggtctggcactgggcacatagtcagtattcaatgaattttggctaaagcccttttggatcgatcatctattgccagtgtggctcagatgcagcccccgccactgactgtgtgactctggcaggtcacaacccctctctgagcctcccttccatcatctgtaaaacagacttatctctgagtcctacacatgttaaacactcaaaggatttctgttgcatgaattagtgaaatccgagctggaagggcctctagagcccagggttgcaaactcatagactccaaaagccaggcaggagccagaaaccaccgagggagctgggtggggacggaggcagctgctactcagctctagtcacaagcactgccatatctggtttctcaagaaaaaccagaaatctagagatttacaagaagtttcccaatttctaagtattggcaactaatttaaaacatttaaacacatctgtggacgggatgtggctgcaggccgtttctttgcaactcatgattcatctaactgctcgtggcacagatgagatcaaagcccagagaaggtgagccaccagccccaggtcacagagcacaggaagtgaagaggaaacagtgacctttctccttcggctgcagccctgttgcccaagctcagggcaacccctgagccctgatcccaagggaggcagtgccgccttctcctctaggcctggcagttccagggtgacaggaaggtcacgatatctctgtttgggtgcactgcagcctccgcttcctgccaggaccaggctgtatcaggcactgggatgaagaaaacattccaagcaatgggctggcctagaaggtaagagctggtggcagagagggggtaagcacaccccttccttacttcagggacgtgcaaaccccttcagcaggcctgggcagagctgggaacagggcggatcaagccctgcttctggagaaacatgctctgccattggaggctgggagctctgtccccgcatggctcgtaggaccttggaatgcatttgtccagcagcttctaatacaccaggccctcatctgacccgcacccccacaacctccatgggctctcctccctctgtcccctcttgatctctctacgcaggcacaatggtgcctgctcagccctgaacacagcagccctgctcccacctcagggcctttgcacacgctattccctctgcctggttcacttcacccattatgcagatggcttactgtagacctctacttgaatgtcgccttctctgtgagaccctccctacctgttcactctgtttaaaaatgcaaacatcccccacagtccttagcctccatctggcttcctttgaccctgctgtgcttaggatggtgggacacatatgttacacgtgtttatttgtgtttccctttcctgttgctgctgtaacaaatcgccgtgaacttgggagctggaaataacatgaatgtgtgagcttacagttctggagggctgaagcccacagtgggtctcagcaggctaaaatcaaggtgtgggcaggaccacgttccttctagaggctcacagggagaatccgttcctccagcttctcaaggccacctgtattcctgggctcacggctccaacctccatcttcaaagccagcaacggcgaggccatctttcccatgctgcatccctccgcctgcaacacctctgcttccctcctgcactaagccccttgtgatgacactgggtcacgatgtcatcatctgggtaatccagggtcgtctcccccagctcaaggagactgctcagcagcctccattccccttggccgtgtaaccttgtacattcacgggttccagggatgaggacgtcttggggaagggcgcatgagtctgctgaccacacacaccaaacacaccaggcgttggctccaggaaggcacgtggtttgctgctttatgtatgtccaatgcctggtgcatagcaggtgctcagtagacccttggagactgcgtgggtgctggagtagaatgttgtggccgccaaagggaggcaggaaaggtgactcagctaccccagtggtcctccccgtcttactgatgaggagactcggggagagctgagatgctgagggctgaagagctgtgacttagcccctacccttccacacccatcctgtgcccacaaagaggggtgggccctgggctgtgtcggggagccccaaagagaaggcctgaagtccggcagctttaaaggggacagtcctggccatgagccctctctctgagcgcccctcacaacccctacaagctcccctcccaaggctaggccagcagtgcctgcagggggctgcccaggcgtggtcctgccatgtgggaactgcctgtgtggcccagcaggacccagatgagtcacaggaaagctggggtgccctccctccagccccacgtgtctccctggcttcaaaggaaaccgactgagggtccaagtttcctcatgactgaaaaatgttccaccccaaaaatgttccacatgagcaacagctcacccagaaagaaagagaaatgaagtaagtggcttttcagcatggggagagacacttggccatgcacagctacaggcagagatctgggaaacagaacgccggggaaagcaagtgaggaacaggagaactctgcaaatcagaacactcatcataaaataattctgcttgtttcacaaggacacatatacatccagggacatatatcatgggcctcggtatggaggctcaaggagaaaacaaaacaaaataatttattttgttttaaattattattattatttgagacggagtctcgctcttgttgcccaggctggagtgcaatggcctgatctcagctcactgcaacctcaacctcccgggttcaagcgattctcctgcctcagcctccccagtagctgggattacaggctcgcgccaccacgcctggctgatttttgtatttttagtagagatggagtttcaccatgttggccaggctggtcttgaactcccgacctcaggcgatccacccgcctcaacctcccaaagtgctgggattacaggcgtgagccactgcgcctggcctaaattattattatatgtttattttgttttaaattatttttatattttacaatggagcttcctgacatgtgacaatgatgctacggttttttgttgctgtttttttgtttgtttttgagatagagtctcactctgtcacccaggctggagtgcagtggcacaatctcggctcactgcagcctctacctcccacgttcaagagattctcctgcctcagactcccgagtagctgggagaacaggtgcccaccaccacgcctggctaattttttgtatttttagtagagacagggttttgccatgttggccaggctggtctcaaactcccgacctcaggtgatccgccacctcggcctcccaaagtgctgggattacaggcgtgagtcactgcgcctggccaatgacactatgcttcactgaacaagcaaaaggtactctgcttcactcttcatttaaaaatagaaactgaaaccatactgagacacctgcttccatctattagagtgacaaaaacatcagaaagttcacaatacatggtgctgatgaagttgtggggaaacaggcaccctcacacattgttggtgggagaataaattggtacaacctctacaaagtgcagtttggtcatatggatcaaaatgtaaaatgcacaaatctgttataaaatctgacttccagagatttctcccacagatacattcacacacacacacacacacacacacacacacacacacacacaccacactatgtacaaagacagtcaccacagtattgtttgtagttgttgttgttttgagacagggccttgctctgtcaggctggagtgcagtggcgcaatcacagctcacagcagccttaacctcctgggctcagtgaccctcccaccttagcctcctgagtagctggaaccacaggcacgcaccaccacaaccagcttgttatttcatttgtaaacatgaagtctctctatgttgctgtggctggtctcaagctcctgggctcaagcaatcctccagcctcagcctcccaaagtgctgggattataggcgtgagcttctgtgcctggtccacagtattgctttataacagaaaaggctggaaacaacctaaagggccatcagtaagaaaataactattaatgaatatggtccggccatgcagtggaatactatgcagctgtgaaaaaggacaacacaggtatgtgtgatgaattagaaagaatgataggtatgttaggttaaaaaaagcaagctgcaagacactgggtgtaacatgcatctatatatgtaaataaagagtgcatacaatcatgtgtgttttcgtacgtacagactttcagtggcagagcccgtgggaaactggaagcagcattgcttagggaaagtgaaacctgggggttaagggtggggagagacactcgttttcattggatacttttttctgtcattgaattttttcccatttaaatgtcttacctatgttttaaacataatttttaaaatataaaagcaatgctcacttgtcacaaaatctaagcaatgaaatgcaaatgatatgaaaccagttgtccctaaccactcccctgaaatcactactattaacatctttccagagttaacaaaaggtcttaagtttagatatgcttctttttttttttttttttttttttttgagacagagtctcactctgtcacccaggctggagtgcagtgaaacaatcttggctcactgcaacctctgcctcctgggttcaagcaattctctgcctcagcctcccgagtagctgggattacaggcgcccaccacaatgcccagctaatttttgtatttttagtagagacagggtttcaccatcttggccaggcaggtcttgaactcctgacctcgtgatccacccgccttggcctcccaaagtgctgggattacaggtgtaagccaccgcacccggcctagatatgcttctatattattcgaacttgtgcaacaggctgtgtgatttgaaattaaacacaagggccaggcacagtggctcatgcttggaatcccagcactttgggaggccaaggcaggtggatcgcttgagtctaggagttcaagaccagcccgggtgacatggcgaaaccccatctctaaaaataataaataaataaacaaatagatagatagataaataaaggaaattgaacacaaaacctcccttttgagtcaacgattatcaaggaggctgttatagttgcagaggtggcctggacagagtggtggccatagagacagagaagtggccagttgtaggagcaaatgtcacaggttcaactgacagggtcagacgcacaggcagggagaaacaggagggaggacatgccatgagctcccttgtctaggcccacactgaggtgacacggcccaagtgccccagcccgacagggtagactgcgatcagggtcaggaattcagtgaggcaggtcctggagcactgggagggggtacgagggtctcagatatctggggctgggactcttgaggtcatagcaagataagtggatgacatactcagtttcaagagttaaaccccagatttacatggctgcctggagtctggattcactggtgtgaaatttggagggagatgacgataataagaatactaatactaacagtaacaataactatcataagaacagaggccaacactctgtagcacttactacaggccaagtgctatatacgtgttaactcataatcccacaatcaccctctagatataggtgggtatagagaagcatgcccccatttcacagatgagaaaactgaggcccagagaggtgaagtaatttgcccacggtcacacagcttgtatgggatagagaagggcagggcgtatcactgaacaaaatggaggtcccttcaccccagagttgcaaacccagcctccctcactcccactacccctctgggcctcactgcatggatggacagtggcaacaacccctcctgggcctccctgactctaccctcgtcccccattccccacaacagtcccttctctatccagcggccagagcgatcttcctaaagttctagtctcatcttcccttggtctgctctcaggcagggccaggcattaggtgaggccagcaggtgccggcacaatgtcaggagacccccctcccaggtgagcccctgctctggcctgattcacagcgaggcctccttaggttttgaacactcagtgtccctcttgcacagatgggaacagacagtctctggaatccccccaaagccgcatttgaagtttctttccaggcagacaggccctttccaggcggatggctgcttcaatccagatgaggatggaggcctggggatctggcagctctgggctgatggcaccacgtccaggggagaggtttctgttttcctgcagtggttctctggcctatgcttgctggatgggggtgttggtaaatcctccagcttcctggggcctggggaggagcaaccctgaggtggactctgcacccactcccagaggccccagcaggacggagccccagctgcccaactgataacctgctcatctagacacccagcagtaccagctgccccctcccctctgctctcagagcttcctgcgatcagctccccgctaagttccctgcccttggactctctaagtgtctgcttctggaagaggcccaagccaagacctgggagacaggtcagtggctcagggctctgtggctcatgatatctgcagtattctctctgtggcctgggtcttcctgtcttctgggtgatccctcggcctttgggaggccgaggtggttggatcacctgaagtcaggagtttgagaccagccagcctgtccaacatggtgaaaccccgtctctactaaaaatacaaaattagccaggcatcatggggcacacctgtaatcccagctactcgggaggctgaggcaggagaatcgcttgaaccccggagggggaggttgcaatgagccaagatcacgccattacactccagcccgggcaacaagagtgaaactctgtctcaaaaaaaggaaaagaagagaaaagaaaagagagaagaaaagaaaagaaggcaaggaagttccatagcccatacagtgggtatcttaggcagggctctatcagatgaaaaatatagcagaaccctgactcaaattggctgatgtcatgagaatttacgtcaactgtctctggtaaaagcaggagtagagataggcttcaggcatggttggatccagatgctaaatcaatgtctacaaagatgcactacctctggctctcatctcttttactccacacagactctccaggtcatgatgtgaccaaggttgccccttgccactcccagctttattctcaccagctcagcaaccccagggaaaagggagcaccaatttccaattgtttcagaacaaggtcagtggcaatgttactcaaactcgaacgtgcccatgttcacactggggccctggggactatgataaaatgcagattctggctcataggtttggggtggggactcagatgctgcattcactgcattttttttaagatagagtcttgctctgttgcccaggctggagtacagtggcatgatcacagctcactgcaacctccactcctggcctcaagtaatcctcctgcctcagcctcccaagtaactgggacttcaggtgcatgccattatacccagttaatttttgtattttttgtagagacctggtcttactgtgtcacccaggctcgtcttgaactcctgaacccaagtgatccacccacctcggcctcccaaagtgctaagattacaggtgcgagccaccccgaccagcccagatgctgcatttctaacaagctcccaggtgctccttgtgctgctgatctggaaccatacgttgagtaggaaggtctttgcatgatgccattcctctcagctaaaagcacattgtaggccaggcatggtggttcacgcctataatcccagcactttgggaggccgaggcaggtggatcacctgaggtcaggagatcgagaccagcctggccaacatggcgaaactctgtctctactaaaaatacaaaaattagctgggcgtggtggcgggcgcctgtaattctagctactctggaggctgaggcagtagaatcacttgaacccgggaggcggaggttgcagtgggctgagattgcagcattgcactccagcctgggtgatgagagcaaacctccatctcaaaaaaaaaaaaaaaagcacattgtatacatatgcagaatattcatctaaagaaaaatcgtaatcaaaattaaaaagtaaaagcacattgtgcacacacaggaaactattgctgcatcccaagagtcccgcatgcagtagctcatcaactggtcacaaggacgttagaggtgggtgctctcattacctcatttctccacaaggcccagacacattcccaagcctgcacagctgggaagcagcgaagctgctttgaccccaagtaatgaattctccagatggaataaacaagggccctgctgatggcccttaatgctctttgcaatcctcctctattacaaaaccaccgtgctgagcaaccccacaggtgcgtgtgtttgtaagcatgcactagtaggtttggggaaagagattcctacaggcgaaattgctgtatcaaaagatgatgtatggttctattattgctaggggctgccaaaagggaaagagactgcccatttccccacatccatgccagaactgcatgttcttgtttttgccactctggggagaggcgcccttcctcatggccctaggaaggtagtgaagttatgtcccagccccaggtaggcagcctccttcctgcaaggggtcatccagggagcaccctgtgccagcccacctctgggcatcctgttgtcatggaaatatttcaaggcctgctttcatcctgaatagcaacttcagtggaaagagaaggcctctgttatgggctaaattgtggtccctcaaaattcatatgttgaagtcccaacccccaagacctgaaaatatgactgcatttagagatggggtctttaaagaggtggttacgtttaaatggttgttagggtgggccctaatccagtctgcccggtgtccttataagaagaacagacctcaggagcgcacatgcacagagggatgaccgtgtgcagaggcagcaagagggtcgccatctgcaggccaaagagagaggccttgacggaaatcaaccctgacagccggcatctcgagcttggacttccagcctccagcactgtgagataataactgtgttgcttaagccacccggtctgtggtcttttgctatggcagttctagcgaacaaatatagtctctttccctgcacacctagaagagttcctgggaagatgcccatatgcctggcttggttcacttcccgtctgttaccaattgctgtggccaccagatgctgaactctaatcggtcaggccttggccaagtgctcatccctggagctagggatgggctcagcctgccaacctgggttcacttttccttgtttgattaaaaattttaatttaaagcaagtgacggctggatgcaatggctcacttctataattccaaccttttgggaggccaaggtggaaggatcacttcagccccagagttcgagaccagcctgggcaacacagcgaaacctcaactctacaaaaaatatttaaaacttagccaggtgtggtggcacccacctgtggtcccagccacttgggaagctgaggtgggaagatcactcgagcctgggggatcaaagctgcagtgagctgtgattgcaccactgcactacagcctgggtaacagagcgagaccctgtctaaaaaaaaaaaagaagaaagtgaggtcgaacctgtggctaacaaggggataatttacatgtctgagctcaagttcagatgtacaagttggattctcttttcttttttggggggtggggacagagtctcactctgtcgcccaggctggagtgcagtggcgtgatctcggcttactgcaacctccgcctcccgggttcaagcgattctcctgcctcagcctcccgagtagctgggattataggcacccgccaccatgcccagctaatttttgtatttttggtagagatggggtttcaccatgttggccaggctggtcttgaactcctgacctcaagtggtccacccgcctcggcctcccaaagtgctggtattacagacgtgagccactgcacctggccatcaaaattagaagtctttttaaaagtccctttgatcccacccatggtaggcaaaccctacctcaggcatcgggtcaggctgcaatttccaactcatatctgcttttagcccctggagatttcacttaaatcctgtgagctcagccatctatccccaagatgcagttcctccaagatacctggcaggcaccctggcaggagggtgtcacggttctctaacctggctgactactgagcctctgggctccatgaggacaggatgtctctctcactcgctgctagcccagtccctggcacagccctggggcttggcaaatatttgttgaatgaataaacaggctgtggcttataagctggttcagattccagctccccactcactccgcatggaagaatcacttcaatcctccaagccccccgttcttcatctgcatgggggatattttgttgttattgttgttttttaaacttgggatttttttttttttgaaaaatagaacagatacagatacaaaaaccacacagcataagcatgtgacttaatgatttattataaggcaactgaacaccctcgtgaccacctctaggtcaagaaatgtaactttgcctgccacccctggaaacccctgcagaaccctgtcctctcaaagccctgcccctcccaaaagtcactgctaccctaagtgttatggatatcacttgtgtttctttcttgttttaccaaccatgtgagcagccccagacactatacttaatcttgcccactttttaaaaacttgatgtctcttttagtttctattcctcctccatccctttcttttccttacaatttacctgcgcagtacctgggccatttaacctgcagagatccctgggtctgggttaggctgatgacagcaccgtgtcatggttcaacacgttctgtccttgggattttctgtaaaacggcagctggatcctgaggctacaccagggatgtttccaagcttctgccctcacgggtcgtggtgagaattgaagggggatgggtgagtgtttgatatcagcgagcagcccccagaagcagccgccaaggctgttcggagatgctcacgaggcctgaacatggacagcccgagggacatcccatctcaacagtccatcctggcttctctccccacccagacccacccaccccactttgggaaagttctagggccatggctggctcatcccagcgagagctggcagcagaatggcctgtaattttagctgtttctcttccctaaaattatttcccatctggaaatggtttcccaaccctgcccaggaaagagttggtggtgcaaggaacatttttctattaaaaaaaaaaaataggggccgggcactgaggcaggagaatcgcttgaacccggcaggcggaggttgtggcgagccaagatcgtgccactgcactccagcctgggcaacagagcaaaactccgtctcaaataaatatataaaaccagccaccaaacactgaatctttgcagcccaggctctggaggcctggctgagtgccagctgtataccctgccttgagggaactctgtcagcgaggagcagagggtgagagggcatagtcagggctctgctgccaggatacccccacccacccagtacattcggacaaggactttgttgcagggcctgggacagccccaggcgagctgagaaggatccgacctggggttgagtggcctgcccagctgctgccacactcgaggtctgtgggttattctaggtcccacagggcatgaaatcacagagcagaagttcttcctatggggattctcttgcagctgctctgagcatttcaagaaaaaaaaaaaatccctgccgctaacatctccccatcacctcgctaattctcttctttctttcctttttttttttttttttttgagacggagtctcgctctgtggccaggctggagtgcaatggtgccatctcagctcactgtaacctctgactccctggttcaagcgattctcctgcctcagcctcctgagtagctgggattacaggtgcccgccaccacacccagctaatttttgtatttttagtagagacggggtttcaccatgttggccaggatggtcttgatctcctgacctcgtgatccgcccacctcggcctcccaaagtgctgggattacaggcttgagccgccgaactctcttctttctaacaaagttctcacaggcccctgactcctgactgtgcaagcaagagcatctggcaagaatatcatgatattttttagcacttcttgtacttattttcataattttttttttgagacagagtctcactctgtcaccctggcttgagtgcagtggcaccatctcagctcaacctgcaacctccgcctcctgggttcaagtgattctcctgcctcagcctccttagtagctgagattacaggtgtgcaccaccatgcctggctaatttttgtatttttagtagggacaaggtttcaccatattggccaggcagtcttgaacttctgacctcaggtgatctgcctgccttgacctcccaaagcgctgagattacaggcgtgagccgccatgtccagccttattttcttatttccttttttttttttttagacggaagctcactctgttgcccaggctggagtgcagtggcatgatctcggctcaccacaacctccgccttctgggttcaagcgattcttctgcctcagcctcccaagtagctgggactacaggcatgcgccaccatagctggctaatttttatatttttagtagagttggggtttcactatgttggccaggctggtctcgaactactgaccttgttatctgcccacctcagcctcccaaagtgctgggattacaggtgtgagccatcgtgcctggcacccagccttattttcataactgttttcatgataaatgatataggttttccatgtttgctaatgatataaagtttcctctgcagaaacaggtttaaagaaaaatgtgggcagaaagtccgtttaaaatatatattaaggaaaataaaacacagatagcacaaaatccaaagctacctggagttttggtgcctggagccatggtgaagagggcatactccagatctgagggcccaggcttgcattctggctgtgactctgtgggccctgtgattttaggcaagtcacttgccttctctgagtcatggtgctttacctgtaaaagaaaggaaaataataacacctccttcctatgatgatctctgagaattcaataaaacaatgctgagaagacactcagcccagtaccaggcacatgggttgcatttaattctgtcagaacacaaggtgggtgctatttttattcctgttgggaagctgaggcccagagaggtcatctagcccatccaaggttgcacagcttgtaggtggtggaggtggaactagaacccacaaagttctaatgtgagactgggatttgtgctcttaaaccactgtgctgctattggcagatccatctatccacccatccatctgtccgtccatccatccatccatccatccatccacccacccatccatccatccacccacccacccatacattcattcatttggtcagaattcatggaattgttctgagttcatggtgttttctcaaaaagcagcaaagtgcagaagttcccagagtaggttcaaatcccaacctgccatgtacaggacacctgggcaagttgtcccacctctccgagcctcagcttgcccatctggaagaggggaacattgatagccctttgaaattcccgcaggaggtagaagactgttttctgggacttcacagtgtcctacgtgccctgcatctgaccccatggtctgcgttcacctctaagtctcagtgaatcaagctccgccatatgtctgcctcatcctgcctccctcctccctttcactccaatttagccagactcagccattggggttccctgaacagcccctgggcctttgtacactttgttcctccagcccgaaatgtcctcttgcttccatctggtaaccatgattcctccctgaaaaatcaggtgggcttccccctctgccccaggagcatcccctgaggctgagccaagctctgcctttctgggctcccccagctccccgcttctctgacatggaaaggtcatggatgtaataacttagacaaactcttgtgctctgccactgtccaccttcttggtcacaaatgtctgcttcccttctttcatgcaggtacatgcacccctctgcaaacgagtccacacacatgtttttacacaatcatggcatgtgatccgaaggcatgagatctgccttcgtacatgcaacatgcaatggtggaacggcattacctctggctagtgacctctcctggactcagctatcacctctgcagaaagggggcagtaacaggacctgccgcacatctgctgtcatgaagaccacatgagctaatatatgtgggaagcccttagcacagcgcctgggagagcataagcgctcgatgcaaggcagaagaaaggcgtgtcctggtgtgacagggcccttccgaccagggctggtactaaggtgagaaaagcgaggtgcctaccgtgcaaaatgtaaggcagcgttcactctcagagcagtgcacctgccgctgggtcctcggagccacagagcagtcccgctcgccccctgctggtcactctgcagaatgacgtcccttccctctgctctcaggggtccctgagcctcggtttcttcacctgtaaggtggggtaggagaatctgcctctcagtttgcagggcaaacaggaggcactcctccaacatcagtgtcctcctctcaatgccagcacttaatgagcacctactatgtgcaaagaaagatgactgagacatgatccctacccttcaggggtttagcgagtggagaggggaggaggtaggctgggaacagtgactaaagtaagacacttgtccctatgcagcacctactgcttaccccagagcagtcagaaccactgccctggcatctgtccatctgcatatgtttactaagcacctactgtgtgcctgagcccaggctcagctgtggatttacatggattaaggggtttaatgctgtcagaacacaaggtgggtgttctttttattcctgttgggaagctgagggccagagaggtcatctagcccatccaagcttgcacagcttgtaggtggtggaggtggaaccagaacccccaaagttctaatgtgaggctgggatttgtgctcttaaaccgctatgctgctattggcagatccatccatccacccatccatccacctacccatccatctatccaaccatccatccatctatccatccatccccatccgtccatccacccacccatccattcattcaacaaatattcgttgagcacctactgagtgccagacacagtgctgagtgctggagagatgccagtgaccagaaagacacagcccatccctgcccccagcagctgttcacaaagagaggatgggcaataagcaagacaaataagtaaaatatatggcacttggtgattcttgctgtatataaaaatagagtaaaagctgtgcacggtggctcacacctgtaatcccagcactttgggaggctgaggcgggaggatcacctgatcccaggagtttggaaccagcctgggcaacatagcatagtacagaccctgtctctactaaaaacacaaaaaattagctgggcatggtggctcatgcctgtagtcccacctacttgggagactgaggtgggaggattgcctgagcctagtcgagatcgaggctgcagtgagccgtgattgtgtcactgaactccagtccaggtgacacagcgagaccctttctcaaaaaggctgggcgcggtggctcacgcctgtaatcccagcactttgggaggccgaggctggtgaatcacttgaggtcaggagtttgagaccagcctggccagcatggtgaaaccctgcctttactaaaaatacaaaaattagctgggcgtggtggcgtgcctctcaggtactcgggaggttgaggcacgagaatcgcttgaacctgggaggtggaggttgcagtgagccgagatcgcaccactgcactccagcctgggtgacagagcgagaccctgtcttaaaaaaaaaaaaaaaaaaaaaaaaaaggcagcacagaagactgagagggtggggctggagtgtgtttcaattttaaattaggccttgagggccattgagggaccttggctctcattgtgagtgagctgggagtcatggagggttctgagcaggggaggagcctggcctgacttaggcccttgcagaatcactccaccaggaggccagagtgttaggacccagggtggaggctgcgagctcggggaggaggtgaccgcacacaggatggcggctgggcttggcggggcagtggagtggggagacagagtctggatgtatcctgaaggtggaacagacaggattagctggtggatgggacatgtcggtggcagacagagaggagtcggggatgaatgactccctgagcctctggggagggtggagctggctgcccttaaggctaagaaggctgtgggcagagcaggtttctgcgggagatgaggagtgggttgcggatgcattcaccctgagttgcctggcagtgtggacgtggagtttgggtttaccctcgtgttgacaggtacacgctcgcggtgcggttatcacgctgctgctggtgtcaccacgcgggcgctgcagggacggacctttcccatcgccaggctcttcggggactgctgcaatgccccgtgcagccgccagggagcgcccgagccgcacccaggacgcgcggggaccgggtcatcccgcgggctacctgtgcggggcaggacgcttagccgcacccttggcctccgactactcggagtctgttgcattcctccttccccccgcgcgccgtgtgacagccaaaactgtccccagacattgccaggcgccccctggaggggaaagtcgcccccacggcagtcagagccatggcctgcgcagccacattcatttactgagcgcctactgtgtgcctgcgtctgggctccgcaggggctcacgggggtttctccttttcatccaggtttctgttcagatgtcaccacctcagaaagaccctgtcctagacacgctccattcaatgacccgaaaggatcttgttgaaatgttaacttattacatttttgggtttttgttgttgttgtttttggttttgctttgagacaaggtcttgctctgtcacccaagctggagtgcagtggcacaatctaggctcactgcagcctcaacctcctgggttcaagtgatccttccacctcagcctccaagtagctgggaccacaggtgtgcaccaccacacccggctatttttttttttttttttttttttagtagagacagggtctcactatgttgcccaggctagtctcaaacttctgggttcaagtgatcctcctgcctctgcctcccaaagtgctgggattatgccactctgcctagccttctttattgtctgtctcccctacccagcagacaaacccctgccctcttagagtgcaacttccagtgagccagatggtcacctctttgaagtggtggcatttgagttgtgccttgaaggatagaagctgccgatcatggcagaatttgaagaaaggtctttcctggcagagggaaaagtcagggcgaaggcctaggggctgctcaagtccctgccttaaggcatttagagcgtcctgcccagtgggtgatgggtccccaggccacacacagctgctggccgagcgccccaagtcatcaggaagccatgtggtgtggacaagggccaggcagcctggacacacaaaggcccattgacagctgcatgggaaaagtccagggcacccaagccggaagcccaaggctggtccctcttgtcaactcccaaggagctttgggtggggacaatagaaaagccagaccttctcaggagactcaagtttccctggggtggggcaaaaatgcaggtggcctggtcactgggacatgcagggcagctgtgtgaggcttttgcagtcccccagccctggttctaagtctagccctgccccctgctagcagagtgaccttggtcatgtcatgctccctctcagaccctaagttccctcatctctaacacagggtgaaagctgggtgcagtggctcacacctgtaatcccagcattttgggaggccaaagtgggtagatcgcttgagtccaggagtttgagaccagctgagcaacatggtgaaacctcgtctctacaaaaaatacaaaaattagctgggcatggtggcacacgcctgtagtcccagctactcgggaggctgaggtgggacaatcacttgagctagcaaggttgaggctgcagtgagcgaagatcacgcaactgcactccagcctgggcaacagagcaacactcagtctaaataaataaataaataaatacaatggggtgaaaaatagaagcaaccttccagcaatggtgtgagactgcctgggtagagtagtgggaaccaggcctgattcagcaggtgtttaagagcaggtggtcagttccagcagtcagctatagtggctggctggagtggccatctgtggcggtcagtagtggtggtcggtcatagtagtcaactttcatggtcggctatcacgacactaagcatgaggaccgtcaggtgagcatggctggggtgtttggtcagacagacctgggttccacaggtctcctgctttccagtgtggggcagatatgatctcctttttccaagcctctgttcctccatctgtaagatggggataatgagagccctacacagggcaatgactgtgaagcgcccagcactgggattatagaatgttccagggctttggagggcagcctcagaagagcaggccaaggaaagcgcaggcctcccgactgaaggaggtctgcagagccagcaggtaaagagtggctataaacgaacaggagctgggcctccctccgcgggcagtggggacgcatgagggcatgttcccagcctgatagcaggaagcatttctggaaaagcccagctgaatagtgaagatagcagagcaggaatgtgaagaacgcagacctgggatcagcttgctgggctcaagtcccctgtactagctgtgtgtccttgggcaagttacttgacctctctgtgccttggtttcctcatctgtgaaacagggataagatcaacctaactaggctatggggttgatgtgaggtcctgatgagagaatatttctacaaagaatgacagataggctgagggccttaaacgatgacgcaggccaggcatggtggtgtgtgcctatagtcccagctactaaggaggctgaggtaggaggatcgcttgagcctgtgaggttgaggctacagtgagccgagattgcaccactgcactccagcctgggtgacagagccagaccctgtctcaaaataaataaatgatgttggactgagaaagcatcaacactcacccaggctctggggggaaggtggatgtgagcaaggccaggaagagccaggaggaataggaggcaacccctgtatgtttgtgtgagcgcagccaggtgccagggtcgggggcggcaggagcagaaaccctgagaatgtaaaacaattcagcagcggccgggcacggtggctcacgcctgtaatcccagcactttgggaggccgagacgggcagatcacgagatcagaagatcgagaccatcctggctaacacggtgaaaccccgtgtctactaaaaatacaataaaaattagccaggcgtggtggcgggcgcctgtagtcccagctactcgggaggctgaggcaggagaatggtgtgaacctgggaggcagagcttgcagtgagccgagattgcgccactgtactccagcctgggtgactgagcgagattccatctcaaaacaaacaaacaaacaaacaaacaaacaaacaaaaaattcggcagcagtggcaatggcctcagggactctgagagctactaacacagccacctggacccacataggaaaagcaagcattctgagatcggaagtatgaactttggcctgggacaatagggagccactgaaggtttggtagtcaagggtcagcccctcttaccctgagagttgatataactaggatactccacagcttcatccccagcacctacctcggggcctgcaacatagtaggtgctcagggaaatgattttaaatgaagaaatgcattaatgggtgaatgagaaactggctactaaaagctggccttattttgcccttcacccacatagcactgggtacctccagggacttagatacagagggaccagcaaaggtaaatgtccggagtgggaacaagctcagggagacagaggagcagtgaggaggccagagaggctggagtagagaaaacaaagggagaacggggaggggaggccccgcggaggtgagccggctggacctctcaaggccttgcgagtagggaatagcgctttcttccaagtgcagtgggagcctccagagggtttggtggttgtgtgtgtgtgtgtgtgtgtgggggggggggggtttgtttgattggtttgttgttgttgttgttattgttgttgttgtcgtcattgtttttcagacgaggtgttgctctgtcacccaggctggagagcagtggtgcaatctcagctcactgcagcctcgacctcacaggctcaagcgatcctcctacctcagcctccagagtagctgggactacaggcacgcaccaccatgcctggctattttttttattttttgtggagacagggtctcgccatgttgccagggctggtctcaaactcctggactcaagcgatcctcccgccttggcctcccaaagtgcttggattacaggcatgagacaccatgcccagacagttgcattttaaatcctcctatcaaagagcataggcattattatccccatttcacggatgaggaaactgatgctcagagattgaatgatttacctaaggtcacacagctacgtagagacagtgccaggattcagcctcagcccattgggctgtgggatctgcagggctggaggggatagaacaatgccagctggagccagcactgctccccatctgctaagctctgccctacgacctctaggtgacactgggtgttggcaggcatgaaggacctacaccgtgggactgtggggaacacgaccaggccctgatcagtaggtctgctgagtcaccaggcctggcccagagctaacctccggcagccaggagccgccccagggtccgtccttggtgccctgcccagcagctgccaagcacagccactgccacatgagctggatgtcctgcagaagccagagtgacaaactacccccaaatctgccctcctccctgtgctgtgtggcctctggcaagtcccctgccctccctggcctgcggtgcacctgctgtctcgtgcaagccccaggccgcagtgcccctccctttgtgctgggtagaatcctggccaattgctgataccgagtttagaccggagggcagaaaggcgggacaggtaagtgcagacagtggggaaggctgtgggccccacaggactagactcttgtgggtgtggcggaggacaaggctgcccatcagagccccaggggcccaggctccacccaggtaacaggacacaagaagagagagcctcctaagcagaactcggtttctataagcaagacagatagatagggcaagccagctagcatttattgagcacttaatatgtgctaggcattctacagctattctcttacttaatcttctcaatagcgggtgatgatcatgatgcatggtgattcctgttttgcagatgaggaaactaagacctaaagaggtaaagtccttgctcaaggtccccaagccaggaagtggcagagccagggtgaaatccaagtccttgtcattccagagcctctgcctggacctggaagcccctcagactctaaagctctaatccccccccaacccccccagcaaagtgcagcattcaggactgagcctcaagggaccagccaggtctgattgtgaacctcagagcaaggcaggattgtcagtgcagtaacgtgagactggtggggcctgatggcctccttggggacagcctgggacaatcgcaaacagaagctggctctgtgctggagcttgccctgtcctggggacctctcccacccaggacgagctcacctcaacatgtaagtcacctgggacccgaggagcccattctagggatgtaaaacctgaggcccagaatgtccctctaacgtgcccaaggtcacacagagagtgagcacacaattggtactactggaacccagttgcctgtcttgtgcagcctcagtttcttttcctcccgggatctcctgtgttaaaaaaaaaaacatacaacgtggccgggcgcagtggctcatgcctgtaaccccagcacttagggaggccgaggtgggcagatcacctgaggtcaggagttcaagaccagcctggccaacacagcgaaaccctgtctctactaaaaatacaaaaattacctgggtgtggtggtgcctgcctatagtcccagctacttgggaggctgaggcaggagaatcacttgaacctgggaggcagaggttgcagtgagcccagatttcgtcattgcgctccagcctgggcaagagagtgagactccatctcaaacaaaacaaaacaaaaacaagaacaaaaaaacgcacagtgtactctcttgaccctcatcatcttccaacaagcaccctggtcctccgtcccacctaaggctgaacttctggtggaagctgtgcatactcccccacccactttcacaccccgccaccctcctcaccctgcaccctcctcacctcaccccctctcctcaccccaccctctccacaccccaccctctccacaccatcaccctctccacaccatcaccctctccacaccccaccctctccacaccatcaccctctccacaccatcaccctctccacaccccgccctctccacaccatcaccctctccacaccccaccctctccacaccatcaccctctccacaccccaccctctccacaccatcaccctctccacaccccaccctctccacaccccaccctctccacaccatcaccctctccacaccccaccctctccacaccatcaccctctccacaccccaccctctccacaccaccaccctctctacacggccaccctctcctcaccgccaccctctcctcggtgcccttgagcaggccttcatcccctgtgtcaccaaatggctcttggtgttgtgatccttgctgccaagtcccagtgtgggatcccgtgctcagagccacttctcagcaacgtttgacactattgacctccctctccttctcgaaacatccttcttgaaacagcctctattcctgacactagatgctccatgggccctgcctctcctcctcctccctggcagctccaactcagtggctttaaacaaacatgtgttctgatacatctcagactcccaacagcatccttgatctctctccagggctctggacttgaatgtcgagttacctacttgaaatatcctaaaaacacagcctggttccccacaaagacttatttcattcctccttccttatctccgcactctccagtctttgttcctcagtgacaccaccctgtagctcaagcatcaaagtgacgtatcattctcaagtcctctgtttccctcccaccacctccaaaatttgtcctgagttttccatttctctgtaaccccatggccaccaccctggtccaggctgctaccgtcctcacccttgacctccttgctgtttctttttggggtttttttttttttttttttttttttgctgctacatttgcttcccatgctgccgggggaactttcagaaacataaatcaaaacatgtcacttgcctgctggaaaccttccagtggcctctggctgcctttccaaagactcccaagtcctcacattggcctacaaggccccatcttcttctccagccttccctcctcccttcctattcagccacattggcttcctttcatgttctccagcaagccaagttctttcctgcctaggggcctttgcacttgctgtttcttctgtctgtaactctcttccttctgctcttcctataactgcctctttctcttcttttaaagcccagctcaaccatcacctttccagagatcacttccctgatcatctaattgaaggacctcacccttcaccctggtcactctcaaccctatcatcctgtttattcccttcataactcagcaatgtcgggagctcacttacttgttgacttgtttattgtctatccacctctcttccccagaatgttggtcccatgaaggcagggatttaatatctttcttattcagtgcattagatggaaaccaggtacacacagcacagtgcctggcacatagaaaatgctcaataaatattggatggatggatggatggatgagatggatgaatgaatggatgggatggatgggatggatggatgatagatggatgggatgaatggatggatgtgataaatggatggttgagatgaaccgatggatgaatggatgggtggatgggtaatgaatagctggaatgggtagttggatagatggatgatggatgggtggatgagatggatggatagatggatgatgagggatggatggatgagatggatggatagatgggatggatggatgggatgaatggatggatgaaatggagggatgaatgaatgagatggataggagggatgaatgaatgggatggataggatggatgaatagatggatgaataggtggatggatgaatgggtgggtgggggatggatggatagggtgaatggatggatggatgaatggatagttggatcgatggatggatggatggatgaatgagatggatgggatggatggatgaatgagtgggatggatgagatggatggatggatgaatggatgtgtgggtgggggatggatggttgggatggatgaatggatgagatgaatggatggatgagtggatgacatggatggatggatagatggatgggatggatggatggatggatgagtggatgggatggatgggtggatgaatggatggatggatggatggatgggatggatggatggaaggacggatgggtgggtaatggatagatgggatgggtggatggataaatggatggatggaatggatggatggatggatggatgagtggataggatagatggctggatggatggatggatgagtggataggatagatggctggatggatggatggatgggatggatggatggatggatggacggatgagtgggtaatggatagataggatggatggatggatgagaggatgggatggatgggatagatggatggatgggggatggatggatggatatgcaaccagataaacaaacctaaagtacacctttaatcatgccactctccttctccagaacctaacttggctgcccactgcctatggaatagacagcaaactctcctctgggacattcaaagcgttctgaactgattccaaagtgggggtgcagtgagtgataagtgagaagataagtcattcatactgaagcattaggaagtggatcagttaaccatctctctccttgatctgggcatgagccatttgagggcagggtcatcttcatctctctgtctagacattgagcccttggtcagcaacatcagagatgtctgatgaataaatacatgactgagtgagcgagtgagcaagtgaaagcagccccactctgccccaaaaagccagcaagcgaaaagcaggaagcttcagacccagagggctgaacagttcaaatttagaataggagagcagtttcactgtttcaggtcactgctcctggccaaggtttcaaaagtatgtaaagctggggctctgcagcaacaggaaaattgaaacttaccagaaactagactggcagtgtctctcgggagggactgatttgaatgccaatgacctgatcctccaattataagagcagcacagtgtcagactaaaaagcacactcccacgtaattgcaaccaaagccacaaagactcccacaactaagagtggcacttcttcagtgtcccgtcctgctgacacacttttggtttttgcagaccttgggcccttccattgtgactcttggtttgcaggtggaagaggagcagagctgtgaagaggagagcttggggtcacctcagctctgccagaggttctgtgacctgccagaggctctgggaccttccctgagtcatcatctgtggagaaaggacttgccactgagtggtgtgttctacttgtaccgctcttctgatcgatcagcgtctttgattgggttccctgggaaacagactcagagagctgggcacgcaggtggtttactggggagtgctctcacgcacagcacctgtgaagggggtagagtggtgtggggggcagtgatgtggggctggaatgcaggcacaccagaggcctcaccagagctcagaggctggaacagcccttctgagttgcctacatcaggaccatgaaatggggtccttagacccccatgtcaacccgacgttggaggtggcctgcccctatggaggaggcagtcttaggcaaggcgattctccttggctgaaggcgaatcctggagcctctgtcctgaaggagaatccaggtggcagactacaatctccactgaagtccactcctcttcacttccaccgcctggagccaacccatcacctctcatctggatgcagccttaagatcctccccagagctcagcattcatgcttggcccttcaccaacagagtccaatctgcaccaggaacccaaagccacaggaggtctcccagcacagaaatcagatcacttcacttcactgcttgaaaccctcaaatggcctcccagaacaaaacacactcagaataaaatcctgagtgatccctgcctctgcctatgacctctcccttcactgtgcttcagccctttctctctctctctcttttataacaatccatcatgacgttcaatgttctctttttcttgagacagcagctgtgttccaccgcagggcctttgctcttgttgttcccgctgcctgacgttctcttccctcagatcttcccatggctgactctacgtccttcaagtttcatctgacacgtcacctcctcagagggatattccctggttatccgatctaaagtggttccacattcctcgcacgttaccttccttttaaaccacttctcactgtctgaaactatcttatgactttactagttgacttcctgtctccttccatcagaataaactccgtgggggtaggaatcacatctgccttgttcaactctgttacctgcagcctctaaaccagaaaccaatgcgttgtaggtgttatctatttgttgaatggcttaataatgatttcatgattctgtctccttacttattgctaatcttgctctttttactgtttgccttaatcaatcagatttgtcaggatttatctgtcttcaggtgctttctttttaaagaacacctttttcactttatttatcacttctactttgttttttctatttcattaattgcatagtttacctttaatttcttattcctatccttttggcttcttatattttctattttcttaagttaaatacttaatccactttgttttcaatttttaaaaataatagacgtctttaaggctatacattttcctctgtaggcagcattagctatgtctcacacactttggtatgaacagtgtctgctttttaagactctagataagtttccatgttggttctgattttcctctgattcaggggccatttagaaataatagctatttttcaagaagttaaaattttgaggttgcttttgataatttattctgaattttattggattatgaaatgagaatgtggcttggaaacatctctactttgcaacttcactttgccatttacaaactctcactagaccagagtttccttgctgagcatgtttcctcatctgtaaagcgagcacaataaacagtggctacagatttatgccaggtgtggtggctcatgcctgtaatcccagcactttgggaggccaaggcaggtggatcacttgagatcaggatttcgagaccagcttggccaacgtggtgaaacctcatctctagtaaaaatgcaaaaattagccaggcatggtggtgcacacctgtaatcccagctactcaggaggctgaagcaggagactcacttgaacctgggaggcagaggttgcagtgaggtgagatagcaccattgtactccagcctgggcaacagagcgagactccgtctcaaaaaggaaaaaaaaaaaagagtttctatggccacctgggataggaggcttttcttgaagccactttaccctaataaacccattgtctttacttatgttgtatttatatctgcagcggccttgatgctgtcactgaccactgggacaccccaggcctgacaggcagctcctgacaccaactcaaatgctagttccgccgggtgcagtggctcacgcctgtaatcccagcactttgggaggccaaggcaggcagatcacctgcggtcaggagttcaaaaccccatctctactaaaagtacaaaaatcagccaggtgtggtggtgtgcacctttaatcccagctattcggaaggctgaggcaggagaatcacttgaatctgggaggcagaggtggcagtgagccaagattgcaccactgcactccagcctggatgacagagcaagacttcatctcaaaaaaaaaaaaaattattttgctgagagaaatctggactatacattccagctgtgaccaacttatgacactgcagctatatttttattagtcagtggatctaaaaccaaaaagtgtgaaaaaagaaaaatttctcaatgataggcaaacaaatcttaatatgtggtttattactttgtatttggttccactgattattctgtcaacaggaatgttagtggccttgccaccagcaaggttggcaatcttggctcccagttacttctcttgtaggtcggtcttaagaacaaggctttggccaggcgcagtggctcacgcctgtaatcccagcacttcgagaggtcgaggtgggtgaatcatgtggtcagaagttcgagaccagcctagccaacatggtgaaaccctgtctctactaaaaaaaaaatacaaaaattagccaggcatggtggtgcgcgcttgtaatcccagctactcaggaggctgaggcaggagaatcgcttgaacctggaaggtggaggttgcagtgagccgagatcgcgccattgcactccagtccgggtgacagagcgagactctgtctcaaaaaaaaaaaaaaaaaaaaaaaaagaaaaagaaaagaaagaaagaaaaaggcgttaaggctttaggattggatgtggtggctcatgcctgtaatctcagcactttgggagactgaggcaaggggctcacttgaggtcaggagttcaagaccagcctgggcaacatagggagacctcgtctctacaaataacttaaaaattagccaggtgtgatggcgcatgcctgtagtcccagctactcgggaggctgaagtaggaggatcacttgagaccaggaaattgagcctgcagtgagccgagatcgcgacactgtactccagcctgggcaacagagcaagagtttgtctcattaaaaacaaaacaaaacaaacaaacaaaaaaaaacagacaacaaaaatagcaagagtactttagatttatagacggtgctttgcagtgaagctgccatgatgaaagcttccattgaccgaccacctgtcgtgtgtgaagcattgttcttggtaactcacatatgttgctgcatttcctcttcacaataacttcatgtggaaagttttaccacctcccttctccaaatgagaaaacagtataagagaaatgtgactttaccaagagcacccagcttctgagtgggttcagcctgggggtgtctggctcttcctacatctggaatcttcagattgagaaggttcattgtcatttactcagcaaatatttgagcatctgccccttgccttctgtcctgcagtatgccgaattctggactaggtgctggagatggaacagggagcaaaacagcgtcctttgtcccctgtcccagttgggaagaaagacaaagaaaagacaaacaaaacaaaacaagacgaaaacagcacttcacagtatatatgatgttagagagggacggggcagctaagattctcaacagttcatttcagtactaaactgttttacttctattctgtttcttttcttttttctttttttctttttttgagatggagtctcactctgttgctcaggatggagtgcagtgtcgcgatctcagctcactgcaacctccacctctcgggttcaagcgattctcctgcctcagcctcctgagtagctggggttagaggtgcccgccaccacacctagctaatttttgtgtttttagtaaagacgggatttcaccatgttggccaggctggtctcgacctcccaacctcaggtgatcctctgcctcagtctcccaaagtgctgggattacgtgcatgaccctctgcacccagactctattctatttctgtcatcaggcggattgacagacacaaaaatgtagtgtctctattgccctagatctctttagccatgtccgaggaccaaggaatgtaaaatttatttgtttttgagacagggtgtcactctgttgcctaggctagagtgcagtggtggatcctcccacctcagcctcccgaatagttggaagtacaaacgtaacaccatcatgcccagctaattttatatatatatatttgtagagacagggccttgccatgttgcccaagttggtcttgaactcctggcttcaagcgatcctcccacctcggaatctcaaagtgctgggattacaggcgtgagccaccgtgccgcccagcccagggttctgttgtaatgagcgcgtccttcttgtggtgtgtcctttcttcacttgcagtcttcactcacagccctgccatttcttgttcctgtgtaatctgtcactttgtggcacttccttttcctctgtgttgacagagcctggcttgtttagccactcttgtgtcctcagggggtttgatttccttccatgttattgctattatgtgttacatagcgatgaactagccaggacacattgttatttttcccctggtttgcctccctgttcgtaatcctccgtcaccgttcacatttctattgattttcagccaaactcgggggttggcaaattacggccacccacctgtttttgtaaataaagttttattggaatgcagccaagcctgtttgtttacatattgtctggggctgcttgagctatgagggcagaattgagaagttgaatagctgagtgacagagactgcatacagcccctgtgacggtggaaaaaacaactgtttttcctctgctctcacactacagcaatcaacactaaagactttttttttgagacatagtctcactctatcacccaggctggagtgcagtggcacaatctcagctcactgcaacctccgcctccgggttcaagtgattctcccacctcagccgccagagtagctgggattacaggcacccaccaccacgcctggctaatttttgtattttcagtcaatatgggttttcaccatgttggccaggctggtctcgaactcctgatctcaggtgatctgcccacctcagcctcccaaagtgctgggattataggtgtgagccagtgcacctggccacagaacatctccatgaccaaatgtgtgtctgtttttccccaagcaccaagcagtggacaccagcggggcatcccccaattccactccgatgctgtctacctgaagatagcctcgggtcacacaggttgagggctcagtccccaagactgtcccctccttcccaccagtcacaagtccaggcttccagaacttctgaccgatcagctccaaacccgctctttgggtttaatttatttgctaaagcagctcacagaactcaggcaaacttacttttacgtctactggtttatgacaaaggttcttttaaaggacgcagttaaacagccagatgagacacacacagtgaggtctggaagggtcctgagcctgtccccatgccaccctcccagcacgtggatgagttcttgttcaccttcttacaaacctccgtgtgttcagctatctggaagctctctgagccctgtcctcttggcttttttttttttttttttttttgagacagggtcttgctctgtcacccaggctggagtgcagtggtgcgatctcggctcactgcaacctctgcctcaagggttcaagcgattctcctgcctcagcctcctgagtgagctgagattacaggcatgtgccaccacgtacagctaatgtttgtatttttagtagagaaggggtttccccatgttggtcaggctggtctcgaactcctgacctcaaatgatccacctgcttcagcctcccaaagtgctgtctctccatctgactgcaaggaaatgaagttgcagggaagtgaagtgacttccccaggccatggagttgttggctgtagaagtgcaaccagcagatcatctctcctgggccctgctcttcctagaattcacagtggaagatgtataccctactcccacctattccttacctccgagcctccctacacagcagagacctctctcctacatgactgccacccaccattgtcctagaaataagtcaaacagtggcatttgtcagtcccacatctagtcgtagcagggtgctgtgtggggcgggcgtggtggcagagaaaaggtgtgtcttggagcagtgagaaaagtactcagggctgtgcttcctcaaggagtctcatggcatgtagcctgcctggaaagttttctgccagcatctagcaggttgcatttcacaagcggcataaatcctccttaaccgtttgcccttacagctagtttgcatgtgatggtaaatctgaattgttactcagtgactgtatttattaagaacagcccacctgcaaggtactgtggcatcgagggtaccaggttaggaggaaactagcatttttttttttttagacagagtctcgctctcgttgcccaggctggagtgcaatggcactatctcagctcactgcaacctccacctcccgggttcaagtgattctcctgcctcagcctcccaagtagctgggattgcaggcgcctgccgccatgcctggctatttttttgtgtatttttagtagagacggggtttctccatgttggccaggctggtctcaaactcctgacctcaggtgatccgcccaaagtgctgggattacaggcgtgagccacagcgcctgacctcagcaaaagaatttggtaagtctagaggtaaagcttaatactgtaaagatgctaaagatgctgtcttcccagatcattaatttagtgcaatgtcagtcatgatcctagattttaaaaagcaattttttaaaatatagagacagggtctctttgttgcccaggctggtctcaaactcctggcttcaagtgatcctcctgccttggcctccaaagtactgggattacaggcatgagccaccatgcctggcccttaaatagatttttaaatataacttgacaaaataaatctcaccggattgagaaaatacataaacatagccaagaaaaacaatttttttgagtcagagtctcattctgtgtcacccaggctggagtgcaatggtgcaatcatggctcactgtagcctcactctcctgggctcaagtgatcctccagcctcagcctcgtcggtagctgggactacaggcacacaccactgcacctggctaattttttcttaaatttttgtagagacagggtttcactatgttgcccaggctggtcttgaactcctggcctcaagtgaccctcctgcctatgcctggctgaaaattttgatgagaatggggttgtgtaagtatgttcaccctgacaaaagagctgtttgctttggatttatggacttttctgtatgtatattacacttctataaatgtttacaaaatttggggtaggatatagaaagtagagataaacttgtcttataaaaacatactacagggctatcataattaaaactgtaaggcataataagacaaatagctcaatgaaatggaagaatcttgctacagaatttaatgtgtaagacatggggaaattattgattgttcaataaatactgttgagacaattagcaatccatttggaaaaaataaattatagaccgcccctcctgaccatatcatacacaaaatcccctttaattccaggggttaaagatataaatagcatgatcattcactgatggtagaaggattaattcatactgcctttttgtaggacaacttggtaggctccttcaacatttaaaatgtgcaggtggggcgtgatggctgacgcctgtaatcccaacactttgggaggacaaggcgggtggatcacttgatcccaggaatttgagaccagtgtgggtaacatagtaagaccctgtctctacaaaaaatacactaattagccaggtgtggtgtgtgtgcctgtggtctcagctactcaggaagctgagttgggaagatagcttgagcccgggaggttgaggctgcagtgacccatgatcgcaccactgcactccagcctggggtgacggagtgagaccttatatcataaacaaataaatatatgtatgtatttgtgtgtgcatgtgtgcatatatatgtgtgtgtgtgtgtgtgtgggtgtgggtgtgtatcccttgctccaacaatttcatttcttgactctctcaagttggcctacacatatatgtgcacatggattgatgtgcatctgtgttcactgtggtgcatataatgtgatagtggaaaactggaaactacctccatgtccattaggaggggaatggctaaattacatacatccacacaagagattaccatgtgtcacaattcaaataataagataggttcagtcattcatgcaacaaatatttattgagcaactactatgtgctaagaccagttcttagctctggggatagagcagaaaacaaaacagtctctgccttcatggggattatattttagtggggttgacagccaatgaacaaagaacaataaaaatatagtacgattcagagtgagaatattgtgaatcaataaaacagggtaaggggggacagggacagggaggtggcatttcagactgggtgctcatcaaatcttctccaaggaggtaacatctgggctttatttgagggagctcttcattcacggaaaagaggtctccagaaacattaagaaaaaacaaaacaaaacaaaagtaattacaggacaacttatggtttttaaactatgcctttgttttcctaagcatgcatataggtatacaggtatagatctggacatcagccaatggctggacatggtggctcacacctggaatcccagcactttgggaggccaaggcaaaaggacggctggagcccaggagttcgagaccaatctggacaacatggtgaaaccccatctctacaagaaatacaaaaattataaaaattagctgagcgtggtggtgtgggcttgtagtcccagctacttaggaggctgaggcgggaggatcacttgagcccaggaggttgaggctgtggtgagctacaatcgtgccactgtactccagcctgggtgacagagactccgtctcaaaaaaactaaaaaatgtagacatcagtcaaactgctaatattaaaggagtggtttaacacttattttccagcaagcacatattcacgttacttttagaatagacttttcaactctgtgaacaaaagctatttagagcacatatgcaaaagagttgggtcagcagaagcagcctaggggttaagagcgtcttccctggggcaaaaatgtccccagccggctcagctgctagctttgtgacctcaggcaagctgtggcttcagtttgtctagagtagctgttccatttgggtttgtacctagagggaggaggccaggggtgctgctgaacacccgacaatgagcaggacagctcccccatttgtcaagagcaatgtggagaagccgtgctccagaacaaggggcagtgcccgcctctcaagggttgaggactcacggtgtgcaatgcacttagcataggccctggcacatagcaagtactcaataaataggaactatttttattactggacttccctgaaaactaaaaaaaaaaaatgttgagagtatggaggacgtggtagtgccaggaatcagttctgctgaatcccaattccagcagctggctggaagggatctctgacctccacagcaacaacagtcttcacggggtgtgtgtctgccaatgggatggcctatacagagctcctcgttccttctgtttggtttttctggtttgaatctcatctcctgccagtagttcagggacattcccaccagatcacctggtctcttgtacgtattcagctgtgctctctcagacattccctgtggttcagaagaaacacactcaagcttctcttgtgggaaaaccaaaacccaaccccacctcacctcccacccccagcttcccgcgcttcctgtggccctgacctcctctttccaccccttcccaggaaatccaagagacacccactctgctgctatctcctccttccaccccatcaggtcagcaaaacggctcctgccacatttccaacacctggccactgccaactcactgcttctccctcttcctcttgtatcgcttctctgctgccttcagcacggctgaccactctccctcttggcctgcttgtcctcccacccctcctcctgctcactcatcctccttttctcaaccaggttctcagaggctgggccaaggctgctgccttctcttactccatgcttcctgttctcaatcccccagcaatctcacccgctgctgggtccttactaacctcctccacccaaagactccccagtctgcctgtagcccccaccctgctgtctctgccaggttgtctcaaaactccctgaactcagcagtcacaactgatctcgtatctatcccgccaatctggtctgactctagtgcccccatctcagggaatggccctgttacctgtgcaagtgggaagccagcagcttaggtggagtcctccatccccatcacccctggcaggtcctgggagcacgacctcagtatctcccagtctcccctcctccgtcgtccctgcacccatctcactcgcccctgcttctcttctgcttctgtaccatcgctcgttctccctgcaaccagagccatctctcaaagttgctatggaatccgaatcgcatcacgcagccctgcctgctgaaaactcttgaatccactgctctaaggatgaaatgcaaactcctccccctgtgcgcccccctgccccctctactccagccacgctggcttcctccctgccctgcagctgtgtgccacacgctccttgtctccccctagctcacttgcttccaccttccctacattcccaactggaatgcccaccctaccatgcactcgtcacctgcagcttccccttttggaccaggtattgaggatacaattttaatcataccccccagtggaccgtaagtttaatgagtccactgatcctgtcttattttctctattattatgtccccggcatctgacactattaatactgtgagtggcaaacattcaacacatagaagccatgatgacaatctctgagcagaatctggcatataaaccctacactgatcccagagaaccttctggaatcaaactccatcaaccctcaccacccccttcacccccaagtcccctcactcaagtgtcttatgcaactttcttggtaccacctgggtgattcttgaaagaaaacccaagcgtgggcatgcctgggcagcacagtggaggactgcttctgttacactgcgtagctttttactcagcccgttcacctgcagcacgggtcaggcagtatttaccccagcaagacccagagctcagctgagctgccttaagttgaactcctgtaggaaaggaaaggaaaaaggaaagacccccaaggacccaaactgtcctacacaaagagaaatgaccaccaaggtttggttcttgaatatgtattttttactgaaaaaatcattcataaattaacatacaaaaatgtacaaacacatgagtaaataatgtaatgacaaaggactatttttgtgaaaagtgttttttaaaacatctttagatttcagtgcaaaaatgtacccctggcacctcttaaaacgtaagagcaagctcaaaaacacgtagtgatggaaataagctagctacgctcaatgccatcgtcaatggtgagtggatacaatcaatccatgtggctcctgctcagctattaatgtctgtggtagaggatctctgacaagaggacctattatgtcaaaatgagtattcttgcaaatacccccccaccccccaaaacagcatgaacaaacggggacacctttccctgcacacagcaatcaaagacaagattaaggggccacccatcagtagccttgaagattttcagctaccaatatatgcacaaggtcacatttggttcctgtttttttttttaacatgacaatttcacactattaacagcacacgggcctggctgtacgtttttaactatgacatttcccatatgatattcgaggcctggtggacacatgactgacagtgcacatccagagattctacactcatcagacacagacatgaccgcaaaggtatcaaagtgaccccactttaagcagtgaaaaaagacctttccttttgttctcaaatcagcattttctaaagtcaggtgttagccttttgccaacagtgtgtacttgatggtaattatggcaacatagagcttcaaacaagatcgcctgacaacactgccgcatacacatacggcacccaggactcagaatcagtctgtcctggcaaatccttccaaatgacatcatagtgttgtcacattgaaagcaactcacagccttcagtgaggaaaggggagaggagaatgagaaggggagaaaagccaaggcagggacaaaggcccggtgggggatgggggttgcagggtggaggggggtctttattgctatatgcaccataaaacaaaggaaaaccaaatgaacttctgtgtgtaatgttcacttgtgaaggtattttaaagcatgaaatgcttaagtcttaaaaaacatatgctatagcttaccggcattttcaagggcaggaacctgctctctcatatgagccgataagagctttgcaatgcaatttattttctaaataccactctattcttcaaaagaacaaaaacacaaacaaacaaacaaacaaaacaaggcctggccaatcactcccacagtttgtggggatcatatgtccacagaaccatcacatgcaacgaaaaaagccctaacccacacacatacacacacacacccctacacacacccatgtaaactatgaaaatcaaggaagttgaaggcaaacaaggcaattaaaaaaaaatacgaagtactcttcagaaagtactcctcatcacaatatataaatatgttttatggaaaacaagggcgggggaggaaaactggcattttccagaattctgcagaagccgacagagactacaatttgagggctttggtttggggaaaaacaaagaggcacaaattcaaatacaatttagaacatgacttcaaggctgggcgcaatggctcacacccgcccataatcccagcactttgggaagtcaaggtgggcggattgcttgagtccaggagttcgagaccagcctgggcaacatggaagaaacccctgtctctactaaaaatacaaaaaattagccaggtgtggtggtgtgcacctgtagtcccagctactcgggaggctgaggtgggaaaatggcttgagcctaggagatggaggctgcagtgagctgtgatcgtgccaccacactccagcttaggcgacagagccagaccgtcttaaaaaacaaaacaaaaaataatatgacttcaaaatgcaggtgggggtgtgagcagtgcacctgggctcttgctgtctggagctttgttagtctaatttcaaagcttcaatccggtcttacctggatcccagctgccccacagcacacaagtgtcaccagctccctggctcctggctccctatttgagtgctccttggttctatgtatcagttactaatgttgacaaagaatctttccagaaaccaaaaagggacacagaggaatcactgaagccagctggtaatgtaggcacattgttcagaaactgtggccaagttccacaagagaaaaagtaagagggggagggattcccatacacacccccgccccccgccccccgccccgccatgctgatgaaaagacagaacacgaagcctggagagccagagatgtgtgtgcagcgagccccgaagggcctgctttaggcaggaagcagcctgctctaacagcagcctcccgcttagcggagagtgggatgagcacatgcgcggccgacagggaagagtgaatccagagcagaagtcaagggcaagactcgtgggggggggaagaaagggacagaagccagctcccagcaataaaggtcgggttattttgttcttttgtgacatgccctatatccactccctcgccaaagtgacagcaattcgggagatgacattcttcaactgcattttaactgagttcctgcacttgccaaccaagtaagtggcctaatacataaatcctcaatttgaattggagccagctagaaaattaaattttaaaaaggcattttacatggcttatttacaattatacttcttcaagaagtgattgttatatatttatgtctatttatctttcccaaacaccctcccctccaccctcaatccccacccaaagaaggtaattttttaaaaaaatgaaaccaaagagaacaccagagatctagaagaatggtgtggagtttcatttgctcttcctaaaacgcagctgccctgtggtgggtttgcctctgctctgaaggccaagaggctccaaggtcatgtgtagggacaggctccacggcaggaccacggcaggaccacggcagatcacagttcatcatgggttctggagactgcggctaagacaggatgtggggtaggagatggggagagagcagcgggacagacgtctgtcttgtgaaaacagaaagccagtgctgacgaaggaagtccccaagctcactccctcagttccagcggctgatccagtgaaggcgtttgtgcgtgtgctgtcacattttccccctgaactctgtgatccttcatgagacacagtatttctgttctcttgctgtgtagaccctcccccctccaaaaaaaaatctcatcggactgctttcttggtggcggtgggtaaagcaaacgtacattctctcctctcagtactcgttcacctgagccagctcgggtgtcaggttgacagttatgtttttatacaaggcgtcgtatgtgatgtttgcaaagtagttcaggttgttgaggccatccagcccttgccgttcttttgacttcctcagcagagcatacctgtttagggagggaacagagaagaggtggctctgagtgaggatccatgcctctgcagccagaggatggagcagggcgtcccacagcagaggacgcaacccatggcagcacttctgcagcacaaggtgggcgcacggccaattctgctatgccaggctgagtgctgtggtcagaaacacctcctgtgtttcatgccaggtgcttcacttaattatttcatttaatgctcacgccagcccctgctagcaaatgaggaagccaaggcttaataatgtgaggtaacttgcccaaggtcagagagtggggaagtgggaggtaaagcattaaaaatacaacagatgagaaagttcatactctgtattcagtgccattttactcccatgaaaacagaatttcagcaattagaattggttgtctagagcacagtcttccccacaatttagaaaagacacacacacacacacacacacacacacaaagaaagaaaaggtaacacagcaactgcagccacccagacagaagctcaggacaccattcggaacgggagcctgcggaaagggcgccactgctctgtcacctcagggaccttcatccaagctgtttcttcccaaattccccaaaggctactgtggagaccacaaggctgaagacataggacaagtgatttccttcgaagaatcttactattgaaaatgttcaccaacggtctgatccccacactgttctgcctcagagttagaatacatgcaacagctgtcaaacagctgtcagaacagggcctcggggtggggagtaggagaaggggctgtaatatgctctaagatatccggacatgaaagtataggggatacttctaagagacagagataaattccaccaaccttccaagaaactggacttctcctcgatggtgatgaggaatggacttgtactttcctgtgtcaccctctggccggctcacagaatagcctgcattctgtactctgtccaagaccaagagaacaggcttttagatacaacggtaatagcccaggagtgaccaaagcctacaagacatgttacaagcttaccctggaaatcacacacagcaaaagctctcacccgcttaactgactcattgtgtcatttcttaaaaactgagttaaaactcaattttaactgaattaaagtttttatgtgaacggaaaaaataggctgggctaggtggctcgtgcctgtaatcccagcactttgggaggccgaggtgggcagatcatttgaggtcaggagttcgagaccagcctggccaaaatggtgaaaccccatctctacttaaaaaaaaaaaaaaaaattagccaggcgtggtggtgcaggtctgtaatcccagctactcaggaggctgagacaggagaatcacttgaacccgggaggcaaaggttgcagtgagcaaaattgcaccagcttgggtaacagaaagaaaatctgtctcaaaaaagaaaagaaaagtacggaaagaaatggttacttccagggaataaaatagaatcaaaatggggattaatacttagacacttgtatcatctaattttttttttttaagagacagggtccactgtgttgcccaggctggagtacagtgaggtgatcatggttcagtgcagcctcaatctcccaggctcaattagtcctcccatctcagcctcctgagtagctgggactacaggcgtgtgccaccacaacaggctaattttttttattttttgtagagacaaggtctcactgttgcccagactggtcttgaactcctgggctcaagtgatcctcaagcctaggccttgtgaagaggtgggattacaggtgtgagccacagtgctcagcctatcatttgaatttttattagcaaaatagtccttgtaattaacaacaaacacatacttttcaaaagccaagctacaaaggaaacagataccaggtagtattttgcatttgttccttatgaggttactgtttacttactccataaaaatattactttattccactcacacacaggattgttcacccaagcttgtacagtacaagccttatgtgatggcgcagctaaatctatgtagacatatcactaatattccacccttcagtttggagtggttccaatgaaatgggcatttagtacagagaacactggtgaagtgaaaagttttgttagaacctttagcaggaggggcacttagttataatatgccttaaaaaccctatttgcatccattaaaggacagagcttaaaaaaaaaaagagccttaaaatgactacattcgcttataggaatttttcctaaataggaataacaggcaaaagaattatctactatatcacactctaaatagtggaaaatggaaaagattctaaatatacaccaggaaatagttacataaattacagtacatctatataaccgaattaaatggagccacttaagatcctgtttacagagtatttaatgttgatataaaaacagtaacacctattgagagcttatcacatatcagatatgccagagctctatacacattacatcatttaatcctcacaatcctgagatttgtgattttaaaaactgacacacagagattttaaattactgttcacttgccactttttaaacacaaaataaactcaatgaaatggtaacatgttacttattgttgtgggtaatttatttttatactcatttgtattttataatgaacgtattatttattagaagaaaaaattgctaaattataatttgttgattttcgcatgtcaaaggagaaaaatgaaaatagctgctttgttgggatatacagtttgttttttaagatattaagatatttttaaattaagattaaagatattttctaaaaacttggatgtgtgtggtgtgtgtgtgtgtgtgtgtgtattttttaagacaggtctcactctgtcacccaagctagagtgcagtggcacagctctctgtggcctcgaactcccgggctcaagtgatcctcccacctcggccttccaaagtgctgggattacaggtgtgagccatcacagctggtcaatttcatttttttccttaaccttttaaactgtagctactagaacatgttaaattacacacatggcttgcattatattcctatcggatagtattggtctgcagtctaaggtagcatttctagaagacaccgaaagaacggcagaggtacctgttccagaggtcgtcatcttctccaccccaaccccagaaagcattaggaaagccattgattttccgaaattgttccactgttaagccactcactccgccaaagaactcggtataaggaagcctaggaggagatgtgggacatcaatcatctgtgtgttacagggtaactgttttccctagaaggttctcatttgaggactaaaaacagtgctctctgtgctcctgacctgaaccatatgaatgtatcaaattagcaaaattaatttttgcaaactgatttttaatagctttagtgagatataattgacatacccatacacaattggcccatttagagtatatcattcaatggttttagtttattcactgaattgtgcaaccatgaccacaatctatattaacatgtttcatcactgtcccccgcaaagccttgcacccattagcaatcaccccctgctcctcctatcctccttagccccttataaccatttatctactttctgtcactatagatttgcttattctggacatttcagacacctggaatcatatgatacacaacctttgtgtctggcttctttaacgtaatgttttcgaagttcatccgtgttttggcacgtatcagtatttcattgctttctcctgccaaacagtgctccaattgtatggatacacacattttgtttatccatccatcagttgatgggcatctaggttgcagctaattagatttccttttcacatcgctcaccatcctttcagatttaacctctttaattaagaagaaatgatactcacagatacatatacttatccaatttggttgcaaaatgcctcggcatctgtccacatccataatagttgcgatcactttccggtatgtgatctacatcatgaaaaatcaaacagtcccaatccaagtctttcattgcctcttgaaagccaacgttgaaaagcatggctcgattaaagggttgggtaccaacctaaaagaaacagaactttatctttaaaagaatcttgaaggaaaatctttgctgtctttcctgtgcctaaagacgagtttattagaaccaactggaaaagatcactgggctagtgtaaccaggtccaacaccacaaatcaactcacagtgtggctcagaagtcactggacctctggcatgggcacagtggctcacgcctgtaatcccagcactttggaaaaccaaggtgggcggatcaggagttcgagaccagcctggccaacatggtgaaaccccatccctactgaaaatacaaaaacattagctaggcgtagtggcgcatgcctgtaatcccagctacttgggaggctgaggtaggagaatagcttgaacccgggaggcggaggctgcagtgagccaagatcgcaccattgtactccagtttgggcgacagagcaagactccatctccaaaaaaaagaaaaagaaaaagtcactggacctctggccccaatttctttaaaaatgtaagtgatagcaaacgcaagcttctctctcccaaggctactgaaggcagaaatgcaaccgtgtaccagcatttagaagagtaccccgctccacaaagggaagagacaacactaccatttctactccttaccacttgctcttcagcacatcaaccaatctctaactgttcataaaccaaatctagtacaaagagtggtttttagttttgtcttgttttatttttaagatctaactaagacaacagtcactgagcatgccagggactcaagcctatggacaaagaattcagtggctcatgaagaaaccagttcaaatcagttaacagcctaattagtgttacagctacattgactcccccttgccactatcaaaatacccaacttaggaccggcagatagaccgttagcatttcccagatgcccagccttgctgaacagtggtgctcagcttttttctcactccagtataaggcaagctccagggtgaccacttaacagcaactcagactgtgagactcaaaagtgtgcccatagagagaggtgagcatgcaaaagaccctcagactgacgatcagtgtattcagggaaatctgtcaaccttttgtttatctatggatatagcacctctagttcaaggatcacatacttcaaaatgcctacagaagccaagtcagtaatgtaaacatataaagtaggcccggcaagagaaaaccacagtaggacagtcatgttccatctaaaggcaaataaaatatatgcaggaccaaaaaaaaaaagatttacagactgaatttgccatgcggtcttcttcagtttgtgacctctatatctggttccctaccaatatttttaagattaaaacaaaaccaaaccctcaggcttagagaagtttgcaaatgtcccaggccacttggttgattaacagcagacatgacaagcactgaggtctcttgactccaaggccacatcctctgtgctgtaccttgctgcagctctttatcttaaggggaacttcctgggtctggagcctgcaggcaccaacaaaaccataatacaagaggcctttgttcatgagccaacaaagctctctcctggattcaagtgtgcccagtactgggcaacagacatctcaaaccaggagcacagaattgctctctgctcccccttcaaacctcaggcaactcgatcctaagatttcagttttattggctcttcacaccaacagtggattagcttgcagcaacctaaactgctgtctcagaagagaaaaaagaaaggaaaagaaaggactactcacttgttcaaccacataaaatgcaaactgcaagcgctggcgctggagcatgggaagcaggtgtctgaacaggactgggaggtgctcgtggcggttccggaaggggataaggatcgccacctggagtggattacagcaaaagaagcacagttaggactctcagctttcactccttagcaggacacccctgatgaattgctgaccaacccatgggagttctgggaggctggctatcttgtcctcagctttctctaaacaaagatctatgttggcaagttggcccttggacctagatgaatgtgattcttacatataccatatcttatagtacatagtaggcctataatttattctaggccataactcataggaaaacacacattctacactgtgacaaaaatacatctataaacttacaattaaaacaagcttcacaaaacagtatttccccttacaatgtgcaatgtacaaatgctggttattcaactgtttttatttcccagcgatgggctggatactgatgtgttccagatctgctgcatcagcagcacttaacgaggctggcacagaatacgcattttaatagatacttgttgaaagaatggacttcagctggggtcacagcttaacgaaaactactgatgtcttctgactatggtcaggcagaaaaaaactaaatctcaatgtcaagccaggtaactttgctttttaatccactaatcttgtagtaaccaatggagaacaggaatgaagcactgactctgtagatgacttctgcaaatgggtcattagagaccaccaacgccctcatccccttgctttgttaatattcctggtgggaagaccaaagggtcttgctcggtcatcagaataatgcaaatttctgtatctacaaaaagagtccttgtggaaacccattcctctaaaatgtttctacatttgcatggaatggtaggatgaaaatgacaaaatgtcatggttagctaatcccatggtgattcggaccaaaggcaaaccccaggtgggcttctcagcattttggctgtgacttcacaccctaccttccaccgaggcatgcaatcagaaggcttccagtgacctccgagcttgatggttgggtctttggagaagagttcatgaatgtaatccattccaatttcactcatgtttatgtctattgggccctctgaacagagacggggaaaagggattaagaggtcagaaaatgataggtttccctatgcctggggttttagtctctggagagcgcaatgctttttcagctgaatttgtttttagcaaggatggaagtcccttcctctgctttccatctcaccgtatttcagttcctcactattttcaaggtgaagaggcaaatcaaggaattaagactttagagttctgcttctgtcaggggccaggtagaaatgaaaactttaagtaaaacagtagctgagcttttttttttttttttttttttttttgagacagtctcgctctgttgcccgggctggagtgcagtggtgtgatctcagctcactgcaacctctgcctctgggttcaagcaattctcctgcctcagcctcctgagtagctgcggttacaggcatatgccaccacacccagctaattttgtatttttagtagagatgaggtttcaccttgttggccaggctggtctcgaactcctgacctcaagggatccacccacctgggccacccaaaatgttaggattacagtcgtgggccactgtgcccagccttcttttttttttgttttgtttattaatatgttttaataaatagagacagggtctcactatgttgcccaggttggtcttgaactcctgagctccagtgattctcccaccttggcctcccaaagtgctgggattatagctatgagcccctgcacctggctgcagctgagcttttctgagaagaaggagaaaagcagctgagcttagagtcatgtcaggtttgctcctgatgcaagtgcagccacactacctctctcaatccattcaccagtgggtcaggaccctgagtgattatgtcctaactcagaatgctggtcatctctgacttaagtcaggaagtggtacagtaacaatcaataaatgctactgaaacaatgaactaataacattagttttaggcctgtcaacgcctatttctgatacacaaatctcagccttcccaaactaagcttacatctagatgcagacaaatgcaggttttaaagggaaaacctatatatgtgtggtgagacatgcaaatgaaacagtaaggcttccaacacaacttacatacttataattaattattcatatatggatgagaatatgttcaaataccatgcacgactatttctaacattttccctattttcactatatttgtgcataaaagtcaactttgcaaatgtaagattttccttttcttgatctcacttcttaaaaaaaaacaattttaaaaaaagaagtggggaaccatattaagaagcctaaaagtataggaaaggtataagagtttactgtccttgttttagcttacacgagattcaaaaaaaagaacaaaaagatctaagaattgttttaactagcactttgttaagaaaataacttccaagcaaggcatggtggctcatgcctgtagtcccagcttctcaggaggctgaggcaggacgattgctccctgaagttggagaccagcctgggcaacatagtgagacccccacctctaagatcaagcactacaatcagtgagaggtttatactaaaaagacaaagctgactgcctatacagtgatgtgctttgacattttcaccagtgacggatggcatatacggtggttgcataagatcacaatggagttgaaaaattcctactgcctagtgatgacatagctgccatagcattgttgtgttactcaagtgtttctggtgatgctggtataaacaaatctactgcattgccagtcatataaaagtgtatcacaaggctgggagcagtggctcacacctgtaatcctagcactttgagaggctgaggtgggcggatcacctgaggtcaggagttcaagaccagcctggccaacatggtgaattcccatctctactaaaaatacaaaaattagccaggcgtggtggcagatgcctataatcccagctactcgggaggctgaggcaggagaatcacttgaacctgggaggcagaggttgcagtgagcggagacggcaccactgcactccagcctgggcaacaagagcaaaactccctctcaaaaataaaaaagtatagcacatacaattatgtagagtacattatactagataatgataataaactatgttactggtttatatatttattatactatatttttaaatcattattttacccttttgaaacagggtcttgctttgttgcccaggctggagtgtagtggcacgatcatggcacactgcagcgtgttgcccaggcctaggtgggagggttgtttgaggccaggagttcaagaccagcctgggcaacatagtaacaccccatttcttaaaaaagtaataataataattttaaaattagccaggcattgacaacaggcacttgtagtcctagctcctcaggaggctgaggcaagagggttgcttgagcccaggagttcaaggctgcagttttttttaaaactttttacaagttcacaagtttagaaagtagaaaggtataatagtaaggttcatctaccattaaagacagacaaatattttctgaataaatttggtgcagccaaagtgttcagtgttcataaagtctacagtagtgcagagtcatgtctcaggccttcacgttcacattcactccacgttcactcactcactgactcaccagagcaacttccattcctgcaggctccgttcatggtaagtaccctacacagctgtaccattttttatcttttatatctcattttttactgtaccttttctatgtttagatacacaaatacttaccattgagctacaattactgtatagtaccatgctgcacaggtttgcagcccaggagcaataggccataccatacagcctaggggtgtcgcaggctacaccatctagatttgtggaattttactctaggaggttctcccaacaataaaatcacctaatgatgtacttctcagaaagtaccctcgttgttaagctatgaatgactgtattcatactttctctaggaagttcaaacagaacccaagttacaaaggacaggcaagggcaaagggaagagtgaaaaagtaggaaaggtagaaaatggcacccaagaacacaggcaaccttgcagcaggctttgaagaggagccaggagcacaactttcacaaaccctgtttccaatggcagggaggtatttatattctctctgcaggcagacagagagatcaagagtgccctcccctttatccattttaaaagcagaggaagacaggccagagctgtactcactcatggaagggagtctttcagggcaggtatggtttgcaaagtaggtgaagtcttcaggaagaaatgttgtagtttgcaggaaggtttcactgtggttcaagtcaagaggataatctagggaggtaaaggaaaaaagtcgatcagactggtatgtgtgatcaaccgtgcaattatcagatgcctaccaagtaagtctttctcttagctatcatcttggtagaaggagacaggactctggactaccgctttgatgcagctaaaaatgtgaacccatcaataaaaatgtcagccaaatggcagattttaaccagtgttcctattcctattgattttataggtttatatgcagcactcagtttacagtcaactgtaattaaatgtaattttaaaaacagcagttgccctcctctcatttctgttttctaaaggaaccacttgcccttcttttggccaagtatctcagcatttatatgcagtattcacctctgtcagcctctacggctggtcgtgatgtttctgttttcagtcttacctaccgacctcccacttatccccttccttctgccacccctgccacacgatccccttccattccccagtctcccatcggtcacatatcatagctgtggttaggacaatcttcagtctttgtattacgatgctgctgttaagtactagtcgtcgctgagaaatgtggaaagttatgcatcttgtttttctgtttgctcagttttatatgcaatgattctaattcaacaccacgcctttcaccaagacatttcctcctaagacatacattaggtattctctcaacttcatcctcccagaggaggtgtggcagcttctggccttcttccatgccaaatgtgcttggggggaggtattctctcggtgatgattcctcccttctgtactctgtgctgcctttctggagaatacagaacaggagttggatgtgagacctcccagtcctctgtctcatcttttctatccagttttccgtcttgccatttatctgccctactttccaagagatttcctcaactttactcaaccttcctttaatcatcatctctgctatcatattttttaactttgaagagctcttgtttcctgaatgttcatttcttactatattcttgtttcatgtttgcagtcatttttctcttattggtatctccagtgtcaatatctttgggtcttttctcctggtctgaccagattctccagagaaatccactcgaatctcctgccagaatggtagagtcctgactataaacatcctgaaactaagaaagaagagaaagaggctggggcatatgtaatccccatcttttcaaatactgtggtcatgccaggtatccccaggttgaggagcctctgttttgccatctctggggttattaagtctccagctcttgccaggatggggaaatgggtctgggtatctgactgctttttaacagctttcaatctccctttattttagttgccacctttgctcctacttcccatattgctagttcctgagcttctgggggatcctggggtggttgctggttctcctgttgctgctttgagcagtcagttttcttgggtttgttaagtcttttatcagtggttcttctgctttctacctaccaaggttttttgctgtggtctccttttgtgttctcattctcaagggtttataatttaaaaaccctcacatatgtatgcccctttagagtcacgttagtggatatgaagagtgtgatggcagatgtctttttcctaggggactgtacttgtagagtaggaggagggtcctccaacctcattttctacagatgaataactggaacaacatacacagaactcagaccaggagccctggctaatgcatgacagagctccaactaaactctgaatgagagatccttccagtatactgtattgtttttatttttttcacagaatattaaatccttttggatccatgctgattctatgaaaattaaaacatcctgttcaaattcactttgtaccctagaattctagaatcttcaactaagatatttttgaaaaagcactatgagcaggtttccaagaatcaaatggctaacacattgaatccttttatatatgcacacggctgcctactctgcgctgcctactctgcaagtactctggggcaaaattcaacgagaggcaacttgaaaattttaactgtgtcttaacaagggaaggaacagaatgctttctgtccttttcagtagtagctttcctgaaaaacactaagcctgcatttatagagaatagtagagactaatttatataaagacataaaccaggctgggtggggtggctcatgcctataatcccagcactttgggagactgaggcaagaggattgcctgagcccaggaggccaagaccagcccaggaaacatgctgagaacctgtctctacaaataattttaaaaattagccaggcctggtggtgcgcgcctgtggtcccagctactcgggaggctgaggcaggaggatcacctgagcctgggaggtcgaggttccggtgggcaatgatcacaccactgtactccagcctgggtgacagaatgagatcctatcttaaaaaaaaacaaaaacaaaaacatgaaccaagacagaaccttaaagataatatttacacagaaattctctgagctcagctcatacatgcaaacctggcctgggttgaatcttcttctgaaggtagtaactacttcaaaaatctatgtgaagaacccctcatcctaattattactcaggatgaatctaatagatgaaattattctcctttagaaaaaaattaaaagacctcacaagtaatagaaaatgtgcctgtgtttgtgatacgcccatgtgtggcaagagacgctggctggaaacatgtattggcacagtcaatacattcactagaaggcaatgaaattcccaaaagtattacactaagtatattttcataaacaaatcaacaaaaacgaagataataatcattctggtcaatgactgacccaagccctagagctagaacctaatcaggaaactagaatttaaaaaacatgaggcaagagacaagatatcactaactctaatgattctactatttggagtttctttgaagatagataaattcctttctacttccttcaaacaatgatacagtaagcctggtagcacctagcatgaaacaaaaaaaaagcatttatttttcttctgattactaaattaataatatgtcactgttttaagaatcctcaaatacgcaacaactctattgcaaaaatcttccagaaacttactctacatcttgggaggggtggcttaatttcctgatttcttgtttaaaaatttttaaataaaactttaattaaaataaagtctacttggaaggccaaggtggggtgctcacttgaggtcaggagttcgagatcagcctggccaatatggtgaaaccccatctctgctaaaaaaaaaaaaaaaaaaaaaaacacaaaaattagccgggcatggtggcaggtacttgtaatctcagctactcaggaggctgaggaaggagaatcgcttgaacccaggaggcagaggttacagtgagctgagatcacacggttgcactccagcctgggcaacaacagcaaaactccatcataaacaaacaaacaaacaaagtctgcttttcagtagcaatagaggccttttaaaatgaaagagacagaggaaattaattgctcacgacctggtaaaactatgtgcagttatcgtgaggagcccttgtttttctcccctgctagctgtccagcaacgggtggggttataccttatccccttggagttccaaatataacttcttactcttctaaagcatgtacctactgaatgaggaaaatgctgagagaaaaacaagcctgttgaatttctacagccacagttttactttttaatttaaatctaatctatttcaaacctggacatgttcttgaagggcaaagaaggcagctgcttttacatttagaaaatggaaaaacaagccgggcgcggtgatctctgcattttgggaggccaaggcggatggatcacccaaggtcaggagttccagaccagcctgaccaacatggtgaaactgtgtctcttactaaaaatacaaaaaattagccaggcacggtggcatgcgcctgtagctccggctactcaggaggctgaggcaggagaattgcttgaactcaaaaggtggaggctgcagtgagccgagatcccgccactgcactccagcccgggcaacagagcgagactttgtctcaaaaaagaaaatgggaaaacaggccaggcacagtggctcacatctgtaatcccagcactttgagaggccaaggcaggtggatcacctgagttcaggagtttgagaccagcctggccaacatagtgaaaccctatctctactaaaaatacaaaaattagccaggcatggtggtgggtacctgtaatcccagctactcaggaggctgaggtaggagaatcgcttgaacctgggaggcagaggttgcagcaagccaagatcgtgccactgcactccggcctgggcaacagagcgagactccgtctcaaaaaaaaaaaagaagatagatagatagaaaatgggaaaacaacagactcctacctacaggttcaaatggctactgatatcatgggcttgcagaccaacatttctgtccaacagcaactgcttattcagcattgcttcacaccagtggttcagcagccttggttgcacattggaatcatctaagaagctttcaaaaatcctaacaccaggccgggtgtggtggctcatgcctgtaatcccagcactttgggaggccgaggtgagcagatcacttgaagccaggagtttcagaccagcctgggcaacatgatgaaacctcatctctactaaaaatacaaaaattagccgggggtggtggcacccacctggtgtcccagctactcaggaggttgaggcaggagaatcacttgaatctaggaggcggaggttgcagtgagctgagatggtgccactgcagtccagcctgggtgacagagcaagactgtctcaaaacaaaaacaaacaaacaaaattctaacattcaggctatacctcaggccaattaaataagaatcgctagcagtcaggcacagacatcagtactttggaaacgtccttgggaattccaatgtatagctaagcttggtattgctaccctaatacctggaggaggtaaaaacctgccttctcccttgtgttaccaaatccagttgagaaggaatcgaaagtgctgaccaatggaccccagcaagaatcaccactttcccctcccatttgagaaaagaccaaacacttgcctctctgcttgaaaaaaatatggaaatttatatatactagaaagatgccactgggacaaatatctgtgaaatataaagaattagcattcttcaagagttagtccattaaaggatgactacctactgggagggtagccacatcgaagactacagactggacatctaaaaccaccgagaaagaggtgaagatgacccactccattaatagattacaaagcacaccagcatgactttactcactctgcagattcacaatctcacaaaccaatggctttcagtgacaacaggaagcttctcctggtcaccacttcaggtttatttccaggttcacagaccccatccccaaaagtctgttttcattcactaatcaccatgttgcttttaaacttaaagaaaaccagcatgacttaaatgtcaccctgggcttttgagctatgcttggcctaatgcagatgcctgaatgtgggtatgtgcctcagcattatttcagcagaggatggtgcataatccaggttaccaccattaagccaacagtgctccaggcagaagtggtcgggccagaggtgtcagtcatttggctgtctcagcagtgctgggcccagaataccctctctgactgtgctaggtagacaactgctttgaaatgaagaagaatgatgggttttcattaaatacactttcagtgaaatgctattttcttttcagtacaggttgagtatccccttatctgaaatgcttaggaccagaagtgtttcagatttctgattttttaggattttggaatatctgcattatacttaccagttgatcaaccccaatctaaaaatccgaaatctgcaatgctccattgagtatttttttcaagtgtcgtgttggcactcaaggtttcatcatgtgtggattctggagcagtctggagttggtattttctgattggggatgctcaacctgtacttactcgccaaagatgtgccagtgacacagcagctccacaagatggtgacctccttagaaacatgctacaacacttaagacgtgctttcttgttaaattcattccttcatgcatacaaaaataacttaccaagtgcttcctatgtgcgaggcagtgtataaggtactaaggatacaaagatgacaaaaggaatgaagccattactgcgattcagggcacaggccctggagtcagagaatcagcaaaccctaaccctgctgctgcatcaagttccatgacttccatgtgccttgttccttttatccctacaatggggacacagtagctaccttctgggttcttgtgagggactacatgaaatcatgtaagtcaagtatctaataaacagtaagagagtccctgatggcacagacttccaatctattagagaaataaacacgtttaacaaaaaatagattgttctaaccagagagatgcaaggaaaaggtatttgggtgtatgataatttgagaataaaagtacaccaagttcaataataacgggtcactggatacaccctccaagggtgaaactcacctctgtactcagttttcaaagacagcaactcaggaagtagcgcaatcctgtgttgccagaccggcagtggtgtggaaatggggtcctgctgcatgcccctctaacttctgagagaactgccagtactgccaaatgcccagagagacagatattccagcctcatctaacactgcagaagtatgacatctggactggataaatgtcatgaggacacaaatgttcccttactcagtgctatacaggggagagcgctctggaagggcagtcagtactgcctcgtttcttcacctaactagaagcaggattttggcagggtttagggaaagagtcacatgatcaagctgcgccatcttccccaagattatatgtactatgtgtgaaaaatgcaaacagcataaaattctgccttaactgacagagccacatgagtcgagtgagaatgtgtgtgcggattgtgcaaaacctaccaccacatgcaagacggaaactgcagggtttcctctcccaggtatggttcagagctcaggtaacttgacccagtgcgaccacaatttgtctaaaaagctctgaaatgtcattcacttgttctttgccaacaagaaagtatcaaaagtttatcagtttgctaactacagtcctctgttgctaaagtggacggcaaaggaaactgataaattaggatgtggtcaattcttttaaggagaggcaattcttttaagagaggcaatgttttctcttgattttctaagcgccacagaataattcgcatttgcaacatttgcaaagcaatttcacattcgacagtgaacttccaaaaatcttgtaacttattagagaagaagagaggactgatttagagggagaatttttttttaaatgtaagtattttaaaatattgggcttagacgaaatcattaagaagccataggaggctgggtatggtggctcatgcctataatcttagcacttcgggaggccaaggcaggtggatcgcttaagctcaggagtacaagaccagactgggcaacatggtgaaagccgtgtctacaaaaaatacaaaaattagccatgtctacaaacaatacaaaaaatgagccacggtggctcacacctttaatcctagcactttgggaggacgaggcaggagaatcacttgagcctgggaggtcaaggctgcagtgagccaagatcatgccattgcactccagcctgggagacaaacttagatgccatctcaagagaataaaaaaaaaagctcgggcacagtggttcatgtctgtaatcccaacactttgggaggccgaggcaggcggatcacctgaggtcaggagtttgagaccagcccggccaacatggcgaaaccccgtctctactaaaaatacaaaagttagccaggtatggtggcgcacacctgtaaccccagctactcgggaggctgaggcaggagaatcagttgaacccgggaggtggaggttacagtgagccgagattaacaccactgcactccagcctgggtgacaagagcaaaactccatctcaaaaaaacccaaacaaacccagaaagcacattagtcctcagttacagaaatgaggcgaatcatgaatccttagtaagatgaaatctcagaatctattttttaaataaaaaccatccctggctggactagagaggcctcaagagagtcccacttaatcatgtggaagtattacttccttcctgtattcagtttttgaaagagttgaaaagaaagagccctggcacagtggcttatgcctgtagtcccagcactttgggaggccgaggcaggcagatcacttgaggtcaggagttcaagaccaacatggccaacatggtgaaaccccatctctactaaaaatacaaaaattagccaggcatggtggcatgctcctgtaatcccagctactcaggaggctgaggcacgagtatcacttgaactggggaagtggaggttgcagtgagccgaaatcacccgttgcatgccagcctggatgacaggagcaaaactccgtctcaaaaaaaaaaaaaaaaaagaagtagtcatccagtcactcttaatgtattatgctatagtttaaatgtctgtcccctgcacacctcatgctgaaatgtaatccccaatgatggaggtggggcctacagcaggtgtttggttcacaggggcagatccctcacaaatggcttgctgctgttgcggtaggttctcctctattagctcccacaagagctggttgttaagaagagcctggccctgccctcctctcacctgccacattgcttcctctcaccatacacacaggcttccccttccccttccaccaagagtggaagcagcctgaggccctcaccagaagcagacgctggcatcacacttcttgaatagtttgcagaaccataagccaaataaatcctttttctttgtaaattatccaacctcaagtactcttttatagcaacacaaacagactgagtcatattgttaacaaaaatgaacgaggattcatttggcaagagcttttttagcagtaaagtaaaactcagccaaatccctcttttacaatgcgcttttcccattgaaaataattattgcaaccgaatttacctctcttgggaggagacattctaatcagaccacctctttactaaaaatatacctgagtcatttacactgctgttcctcttggcataagcactccgaagcacctgctcataaacctgagcaccgattgttctcacgttgtcccggatcagaatgccttgggcttgcatcatgaagaggtaggtgttcactgcagaaagcaaaaaggggaaaaagaggtggattcagaagcaatcatttaaaaaaacataccacatagctatggatttttttttctttttggacttttaaagcctcttttagttcttttaaaaccctacatgaccataactctattttccatacctttcaggacaccaacatcttttgggtagctagtagagcttagaggaatttctgtcaatatccaacagttctagaaaaagcatcaacttaaaaaaaaatatattccatctcttctccaaatacccaatctgtattctagcactctgatcatcagaagaaagacctttatgaattagttaaaactttttttttttaaaggtttctgctctctttaagttcaccttctcagaattagttcatggttcttcatagagaaaagaaaccactgactctctgactgctagaagcactgaagccatggtctgaagccacggtctggtcttggcaaccttttcaaagtggtagactgaggctccaatcacttacccttgggagatttggaaagaaaaaggagtaacgaaagactatttgcagtcctcactatccacccatcccagcccaaaagtccaaagcaatagggaaagagcacagtccaaggtcaattaaaacatgctcttaacaaatgagtgttcagattaacctgccaatcttgtcttctttggaaagtgatctccacttgcattttcctgaagtctctctatgatacaaaactagaagctcacaaacacgtcaaaatgtaatccctatattctacttgcaaactccactgctatgccatctattttcaagaaacagtgagattgtaaaacatagtttcttaaccagtcactctaattccctcaaattgcctttgtcattgtgaaagggggatgtgttacaggggtggaacatttacaaatctaaactttgtgggtgtctgggggtggattcatctaaccgcttggctaacctcgggaccaggccccagtgcctcctccacactcaatacatctggccttgggatgtggattccggctctttgacaaaacacttggctgacattaggtttcatcactattaaagcagtatcctgtacataatgcgcagcaaacaatgactgaatggaataatggacgaagcttagaagtcactgtatttcaagctagtgcttttggtgctttatactgggaatgacagaggtggggtgggttagcataatgtcaaaaaccccacgtggccaacattaaacagggacattgaaatctttcgaaagatttcaaatcatctcttaaggtatatcccaagccataaaataataagcaaaaaggaccagtgttcagaatgctttccgaaatgagggagcagtttcaaatgcggccttgcattgattgggagacagccctatgcttaacttctggcaccgtcggagaatagatcagatattgtgtttattctctagtagctaggaaagattttaaggaaaaaagacagcttccaattattaaaaaaaagtataactgtgtgaagtctctgaaagcaggagtaacacctcattctctatttccagcagataggacactgccagtcacagtaggggggcagtccacaaatacttgttaaacctaagacttaaacttcatctaatatcacatttctaattcagtcctgtgttgttgttgttgtttttaatcatttgggctgtgcagtatgttcccactgccctgaaatcttcctttcatcccaacatattactaaaccagttgtcttattgaaaattttgtgtaaagcttttattgtatttattgaaaatcttgtgtaaagcttatagtaaggtgccgccaagaactcactacctcctttcctctgcactgcaaaggacacagttgcttagcccctcctttaaacactctccctttcttagctttgcatcccaactggaggattcctctagggcagtcattctctaatgtttcccacccatcccccagagtgcttttaagaagcctgtttcctaggtcccactacccagactgatgcatctggtctgagtggggcccatgaatgtgcacttgtaacaagctcgcaggtgataaatggtgctggactaaggaccacacttctataaccactgctctagggaactctggccacataataaatataagcaacatttattgagtacttaattacataattccttactgcatttaatcctcataattatcctaagaggcaagtaatactatccaatttacaaacaacttctaggcttcagtttctccaagtatcttcacaaaggtcaactgagagcactagaatttgaaccaggtgtgtctgtgctcttaaccactaagcttttatacctcactcatccatgttctagccacaacctctctctgaaagatttcaagcacccacatggcttaaatgcttactcttaaggagatagctctcacatcttcatctcctgcacaaagctgccagatggatctttcttgacctttcttaattacagatttatccacactgttactgctcaaaagtcttttacgtctcttgcctttatccctgagctgctgctacagcaaggagtctattctttctgccgtgcaaatcccattaatccttcaaaccccagttcacagacctcttgaggaagctttcagtaccgtgtcagtctccccccttctccagtttctgtgatggtctattacagactatcaaaacttggatttgtttccatgttgacttaattcactaacaactgtctcgtgttagtctcgtcattcaactaataaattaacgtaaaccacatagtatttttttttctaattatcgaaaggaactagcacaatgctaaaaaaataaaaactgagggagtaaagattgccaaacaaaaggaaataatcacaaatccacaacttgggattggatggcattttaaggaacactcaccaatatcatcgaatgcttcccactactggggaactatgacctccaagaacacagagtcaacagggaaaatatggccatcagcaaagaaaacctactttggttgggtacaaaatgtttcccagtcacttgttttttctttttttcttttttttttttgagacagagtctcagtcttggctcactgcacctccacctcccgggttcaagtgattctcatacctcagcctcccaagtagctgggactactacaggtgcatgccaccatgcctggctaatttttgtatttttcatagagacggggtttcagcatgttggccaggctggcccagtcacttttgcccactggttctctctcaaccttccccagacaccctctcccactcaggccccttctatgtgtgcccctcccatatcacaacttcacacaacttcacatcttcatcatcacaacttcatcatcacaacctcactccccatccaggctgcgctctctgcatactggcccagttgtctacacttgacaaagagttgtgaccacactaacggagttgtccagatgcaataggatgagcctagaaacacacaaaccaccagcagccctgttccacctgttaccaaagatctgtaaaagcaagcccctttttggagattcacaatgcacaataactcaaggcccagaaattcccagaagagagatgtttagttatttagcctgccatttcccaaaccagaacatcaagtgagtctctgcagaacttactttgggaaattcagttttggatatttctatgaatagactttttaaacgtccattacatggttaggtaatcaatcaatcaatctttgctgaatgttgttggtaaacagcagtcacatcctattactaattcatatcaagcttgctagaagcaaaatccccttaatctttttagagatgctaaattgcccttctcctgtgcaatgctcatgtagttggttatacaaatcaaactgtaggacctttcaggtgtctctattaaaagtcttgttaccggttgggcgcagtggctcacatctgtaatcccagcactttgggagtcggaggcaagaggatcacttgaggccaggagttcaagaccagctgggcaatacagcaaaatcccgtctctacaaaaatagattttaaaaatactagccgagtgtggtagtgtgcgcctgtagtcccagccactcactcagatcaaggctgcagtgaaccatgatcgtgccactgcactccagcctgggcaacagtgagatgctgtttggttaacaacaacaaaaaaagcagtcttgttaataaacttaggccatggctctggcctaaagtaggaagtacatatgcatacacatgttgctttcaatctaaattatctcattcaaaattcacatctctgtgaagtagatatcatcttgagtgtttattttagattaggaagtcaagtcctccagggggtaatttgcccaaggtcatatggttagagaaatcaaaaccagagaggtgaactgagttgctgcatatattttgatgagctttactttgtttttttctttttgttttttggagatagagtctccctctgtcgcccaagctggagtgtagtggcgcgtctcggctcactgcaacctccatttcccaggttcaagcgattcttctgcctcagcctcctgagtagccgggattacaggcacctgccatcatgcccagctaattttttgtattttggtagagatggggtttcaccatgttggccagactggtcttgaactcctgacctcaggtgatctgcctgccttggcctcccaaagtgttgggattacagacgtgagccaccgcacccagctaactttgaaaattctgaaagcagtactttctaataatatggtcctgcgcaacagtggctgaatcacagttaaaaaaaacaattttaagttggtgtgcagtggttaaatcctccagtttcaacgagtctctactgagcacctccttcactgtgtgcttttcaggcaccgtacgagggcactggaggccaagtatgcataaggcaacgctgaatagatgagtaatgtatagacaaaattcaacaaattacaatgcagtgtggtaaatgcgacaacatttaacacaaattcacacttactaataatttgttttacactttcatgagacaatgtaattattatccagcctcatatctaggaggagggatctcttatatataaccataattcagttgagaaaaataagccccattcaggtctacacaattagaaatttccattcagatgccagtgttagcagccttgggccatggcttaactggacagcttccgggggcgaaggactgggtttcctgcccttcagccacctcttggccacacaatggtgcctttcttcctctctgcttctgattctaacaggaaaacctcctcctttctcactgaaccttaatgtgtatccttaatgtttgctgtggttggcttggtaagctaaaagagggttcagaaccagaaaagaaaccattcccttcctgaccactttttacaatctgtatctcacccccaacatatgcaaacatacaacacacacacactcacacccaaacaccaatcaccctcctctgctttggttttctacttaacatacaacatattttaaaatttatcttgtcccccataagaatgtgagctccattagggcaaggctgttgcctacttcctttaatgctgtacccccagtggctagaatggtgtgttgggaacacagaggatgcataataaatatctgaatttaaaaaataataataataagttgagacaatatagagttttctgaacttggctgtgctccaggaggcatggagatggatttcaagcccttctctttattttgcattagccccctcctcctttctgagaggaacccaaaatactgtaagttaaccagtttcactgcactaacctgttcctaagaaaagctcagtcattcctttccaccaattgagcagcactgccaaaaagattagctttccccccaaaatgttctgttactctcattcctcataaagcttttaaaaacatgttccatactataatgcacaagtttattcaaaatcttgtgcaataatatttgtagtagaaaaacactagggaaaaaagcctaaatgaccatccaaaggagactggttgaatacatttttatactcactcccatggatgagtaccatgagaccataaaaaagaatgagaaaacatttgttatagtccaaaactagaaagaactcagaagagattaaatatttgtagcctattccgattttggaatactatacagcaacaggaataaataaactagaactgcatgcacccacgtgaatgaatctctcacactttatgtgacacaaagaagccagacacaaaagaacacatgtggtatgattccatgtagataaaatacaaaaacaggcacagctaatctacaacataaaagtcaggagaatggctaccctggagtgcaggagagttgaaggtggcttctggtcatcttatttcttaacctggatgctggttattcagatatattcattttctaaacattcaccaagctttttgcttacatgtacacattttaatgttatatgtcaacaaaatttaccttccccaaaaataaggtgagcaaaacccatgaattgacttccaagacatattatgctacttaataaagggaaattgatatgcactcacatatttttacaaaaaaaaaaacataggaagagtaaaccagaaactaataaaaatgaaggggtaggactgaggcctgagtacaccttttatattttggacatttacgtattaaaaaaattatctagctgggcatggtggcacacacctatggtcccagctgcttgggaggctgaagtaggaggctggcttgagcccaggagtttaagtccagccagagcaacatagtgagaattcatctcaagaaaaaaaaaaaaaaaatatatacatatatatatatatatatatatatatatatgaaaaatgggcaaaccctaaaactaaatacaaacacaaacaaataattctaataatacattgtactgaaaacacaaccaacggaaaagtactccgatacattctttgagagatatactgtaaggacaaaaagaaccgtaaagaatctggaactctgtttagcaggtctgttgattacagtcatatttgggtcataatcatgacatggaaatcaatggatgctaaaaccctcaggtgaaagggttgttgaagaggatagtcaaaacacatattcaatgcaccaccccacaaattacatgttgatcacaactgacatttgtaattttgctgcataagaggaagatctagcaggtcatccctttaccaaatgtctcaactcagcaaccccaatattagaacaacctacagttccaggctcctaatgcaatgtaagatatttacttcctatataatattcttgctaatctactgaagagaaaacaagaagataaatctagaatatcccttaagagttgggatctcactctgtcacccaggttggagtgcagtggcatgaacatggctcactgaagcctccaactcctgggctcaagtgatcctcccaactcagcctcaggaggagctgggaccacagcggaatgcccccacacacagagctaacatttatatttttttagagatgaggtctccaaatacacacacacacacacacacacacacacacacacacacacacacacacactttagattcttcaggctgaaagaacataggatattctacaaaataactgatctggaccaaaaaaaagcaggggctattctagattagagacataactaaacgcaatacatgaactttgactaaattctgaatagaaaaatcagagtgctaaaatagatatttttgagacaagtgagaaaaattaaacatggaatgtatatcagatattactaaatgttaagcttaagtgtaatcatagtgctgtgattatgcataatgcgcttattctcaggagatgtatattgaagtatttagaggtttcgcatcatgatgtctacaactttactttcaaatgcttctgaaaaaaatgtgtgcatatgcacatatgcatgtatgagcttatgtatgcatataaaaagttaaagcaaatgtgacaaaatgctaccaactggtgaactcaggtgtagagcatatatttattgtactattttctcaatgtctctacagatttgcaatttttttccaaaagaaaaataaaaggttgttaattaatgtgttgcaactgccaggttaagtggcttactgttctgctggacttcaagctttctccaaaaggggaaaagtaaagtggccacttactctccaggagtggccaagttcccaactttatttaatgaagaaacagagctgggcacagtggctcatgcctgtaatcccagcagtttgggaggcctaagcaggaggatcacttgaggctaggagtttgagaacagcctgggctgttcctagtgaggctctgtctctacaaaaaaatttaaaaatcagctgggcatgatggcgtactcccaagctacttgggaggccaaggtagaagaatccttcgagctcaggagtttgagctgcagtgagttatgatcatgtcactgcactccagcctgggtaacacagcaagaccctgtctctcaaaaagggggggtgggggggtagtagtaataataataataataataataataataataataataataatgaagaaacatcaagtcctaaggactttttacacttctataaaacaccagctacaaagagatgatgaattcttttataaatgttacaaactgtaattcagacatacattcattcaacactcattatatacataagatgttccaggactgccctatactctaaagataaagagatacaagtaagacacagtccctgccatcaccttgcaatggaagaatagtcacgtttgttcaggggtacaggagagtggctactagatcatattgggagcaggggccaggaaaatactctcagaagaggtaattctagagtatggtcctgaaagaagagcactgaagcaggagagggagcagcataaatgaaaacaaagagccatccagggggaaatacatctgaggaatcaaagaagtttcatatggctggagcgaaggttgcatatggcaagaacatgagacgggaggctagaaaaatggggggagcaagagcgaaagggcttcacgcactatacttggggtctgaacttgattctgaaagccacgacattgcagaaacggtccaggattggatttccagtgggccaatgagtaggtatcaatcggaacaagtaaatttaccctactcaaaattcctggctccagattaaggactgaactttttagtatccacatctaaattcttagatgaactaaataagattctgtgtgtagaatcccccaggtgattaataaaagttgggagcctgaatcttagcaaagactgtactttctacatggagcaatgcagaggaacaccacatctccatggcatgtagagtggagggaaaatgtcaagatataaagctagacacaactgaccagagccagaaagaatgacactcagcaaaggtgctgcttggtgctcaggggggtctgttagactgggttttctttctctgaatttactcacatcatcatcccactataaaatgtgggatttataacagagtcaaataaattccagaaaaacactggagccaatctatggatcacaggttctacctctttagcatgtccatgcttttggcataaagaacagggaaaagggaagagaatctaaagagaagagaagcagaaaatgaataaatagaacaggaggctccctctcacgctcatgcttgctagtgctctctccttcccccatatacaaaatacacagataagacacaataaaaattaaggaaaaacaaaatgtgccaaaggaatgttgaagtttgatttctgccatgctagagtatctgcaaaacctgcattatctttttagaccaatattttgtggaaaaagcacaacctgaaaaataattcaaccttacccccaaacaagcagatgatcagtgttcactgctctgcacaacaggtaaagaaagaatctgcttattctgcttataaagagatggattcctatacaactaataatgcatttattgagtccttatgtgccagcacctttccaaatgcctgtgttttatctcatttcatcctcacaataactgagaggcaggttgttaccatcaatttagagatgaaaaaaactcaggtctgaatacgcaatctgaccatgtggagccaagatttcacagcaggctttgtctccagagtccagatttttaacaaacatgctctactgcctctcagatgctcaatcccctgaatccacagctactatgctgcccacactttgtttgattccttttacttggatctttttgaagtgtttttttttttttggcttgtgttgttgttgttttttttgagacggactctcgctgtcacccaggctggagtgcagtggcgcgatctcagctcactgcaggctgcgccccccaggggttcacgccattctcctgcctcagcctcccgagtagctgggactacaggtgcctgccacctcgcccggctaattttttttgtatttttagtagagacggggtttcactgtgtcagccaggatggtctcgatctcctgaccttgtgatccacccgccttggcctcccaaagtgctgggattacaggtgtgagccaccgcgcccggcctgttgttgtttttgacaggatcttgctctgtcactcaggctggagtgcagtggcacgatcatggctcactgcagtcttaacctccctggctcaagcagtcctcacactttggcctcccaaagtgctgggattataggtgtgagccaccccgcatggccaatattacctggatctttactgtcaacatgtcatatatttcaggcttccaatattccacttcaggagtgggtgccaatactcacgctataatgcatcccccaaattttataagtttgaagctctaatgtgaatcatgaatttttccattttaaatctgcttaaaatgctggatactcatactatgcattacatacattaacatacatttaagagagaaaatacagcttttttaagatacaaggaatttttggcagcaaaatttacacccattgtcttatctatttaaatattttggagcaaccgtgtgacaattttcatacaaaaagtgtttaaagagaactgggaggaggggggacacatacacacattaacaaagtaaataatacaaaaaaatattttgggggaaaaattgatttgaggaaacttttgctttcctaatccttctcatttgaggcagaaaaatcacaaagtcattcgtaggtttcatttttcaccctaattactattcctagctattaaaaaaatccaagtggtaaaaattaacagctatgaagtaccctataaacatttccactgacctattagtctaccatctgttaaattattaaactgtacataagattagacatgaaaatgctgtctaaacagatactagatggctgggtagcctatggtaagtactttactgatctaagcttcagctttgcttcccccaaaattcttaatagcatgaccagttatcaaccctcagaagtaccaatatccacatgcacagccacataacctcagtataagcttgggtgggagaaaactgtaaattaccttgctggttccattgaaactgaacacgtacacttatcaaaacaaccctgcggagaatgggtgggggtggggggggcgtcagggtatgacggatgttgctgatgggaatgtgctagaggcacaagaccagcactgccacactcctctgtggaactgaaaccagaacaaaggctctgctcccctcacctccgcaccccctcgtcctaatctctgtccgtcaccgcccccactccaccgaccaatccctgtccctgaattgccttgtggttccagcctcccacccccactgacacctcctctgtatgaacgtgcttttgtgacacccgctcatactaagctttttttttagacagtgtctcgtcctgtcacccaggctggattgcagtggcacaaacacagctcactgcaacctcaacttccttggctcaagcaatcctcctgcctcagcctcctgtgtagctgggaccacaggcgtacaccaccacatctggtgaatttttttatttttgtagaggtagaatctcactttgttgcccaggctggtctcaaactcctgggctcaagcaatcctcctgcctcagcctcccaaactgctgggattacatgtgagagccatcatgcccagccaatactaagctttaatgtccctttcctagcttttcctggtatcatcccacccccaagattagaactgcctacacctatctttgggctctttctcaactgatacaccaacttctatccatgacctctacaaatttgagcatgtctctctcttccaatagactgtaagctccttaagagtacagacagtcttattcttttcttcatcaacttctgataaatagtaggcatttagctatttattaaagaattacataggctgggcgtggttgctcacacctgtaatcccagcactttgggaggctgaggcaggtggatcacctgaggtcaggagttcgcaaccaacctgaccaacatggagaaacaccgtctctactaaaaatacaaaatcagccgagcatggtggtgcatgcctgtaatcccagttactcgggaggctgagaaaggagaatcacttgaacctgggaggcggatgttgcagtgagctaagatcgcgccattgcactccagcctgggcaacaagagcgaaactccacctcaaaaaaaaaaaaaaaaagaattatagcttggcacacagatgctgtgatagccggaggagttgccttgcttttttaaggtagaagtatactggtttttctgcaaccacaaaaaaaaaggctataagccagaaaaggtcatagtgaaactgatacttcaccaactgtgctggtgttcgtgcagactggtataaaccctttgggaaaactatttgcaaattcaacaatagccataaaaatgctcataccttctgagctagcaaagtatcctaaatatgaggctattctatgcacaaagtttttacttacattatttctaaaagcaaaatcttgggaaacaactcaaaatcaacaaccagcagctctcagtgctgctctgcctgtggagtagccagtttcttttcttctctaataaacttgctttcacttactaaaacaacagcacataaactgtgacacaaaacttgacggaatcttacacatctttaaaagtgaaaactatgcaaccttatcaccatacaccttatgtataatatttagcatagactatcacatttttaacaacatgaaaaaagttctgctatatcttgacaactattgctaaggaataagaacatgtatcaggctaaaacagacttgaggcaaatttaccaacctgctttgctgttagggagtaacagtgatgtgagatgaccttttttccttctgttttaccaatgttctttacaacagtaatgatttatttttttgagacagggtcttactatgttgcccaggctggtctcaaattcctgagctcaagagatcttcatgccttagctcccaagcagctgggactacaggcatgcatcatggtgtctgactgagtgagggtttaaaagaatgcaattctatagcaaaaagttgaatttcttcaacactgaactgctatctgcctacaactaagtttcttctaaccctttgcaaacatgtaacgtaaaattttaagttgacactacaaactgcttgtctaaatgagtcaaaagactgatacctgttctaccaaagcctcaccaacattcagaggctttggtggaacaggtatcccacaccttgttgatggaaacaaattgatataacctctagagaggttggcaatacagatcaaagtgaaatgttcatactctaacccagtagttcctactttcaggtattcatcctaaagaaataattggataaataacaaatgtgttcaatactgtttatctcagtgctacttataaaagcaaaactccaacctatctatgcaccaaaagggtctggaaaaaaaattatggcaaaatcagaccatgactaactcagctatcactgaaataatgattattgttttagaagtactcactatttaaaaatcataccgtgcaggccaggcacggtggctcatgcctataatcccagcactttgggaggccaaggtgggcggatcacctgaggtcaggagttcaagatcagcctggtcaacatggcgaaaccccatctctacaaaaaatacaaaaattaaccgggtgtggtggtgcatgcctgtaaccccagctactcaggaggctgaggtggatcacttgaacttgggaagcagaggttgtggtgagttgaaatcatgccactacactccagcctgagtgacagagtgagactctgtctcaaaaaataataattttctgagattatgtctgcatttgtgctaaataatttacgctaggagcagtaataaaagcagagatgaagctattgattcaagacggtatatacattgtatatatactacatacagtatatcacatttgtgttaaagacacaaaggaaaatataagcctagaacagttttagaaatcacttatcaagatgttcagtgttttttatctctgtgtggcagaattacaggtcatctgggttgtcttttctttgttacaatgcaacatttccatgaacatcagaaccctgtaagataaggaggttctctgttccactagtgaaaaactgcagtaaccaaatctgtttaaatcaactgacccaaaatttcaaagtttccaaagttactgagaaccccttttcacacagcatctactttatgagcaccctttaggaatgctgcctttgggcagggtctttttcttttcatttttttttaaaacaataatcaataaatttttgtatggggtcgggggaagcacaaaaacacaaccttctgccttagtaagagattcctcccctcttcattgctccagaccctaataattcccctaatctcaaactgttattctacccccaaattatcctaccccaaatgattcataatgatcctaaagctcttggtgcttctagctttaacttcatcaagcaagtttcctctatctagcctaccatccaaacatattcttccacatactgttctttggtctccctcctgattctcttttggaaagattattcttcatgtcctatggggataatatattttaatcacattattgttagcctggaagcttgtaacagactaatgggttatctactcgttgggaatttaagtgcttccaagaaggcagcattccaactggtattaacacccaaactgtcaaacataggaaatcagagccatgctttccataaaaaggcaaaagatgccagagaaagcacttgaaaatttctagcttctaaggcacacacacttagcaaaacaaagtctttccttaacaccttgtgggtaatgaaacccttcctctcctccagatggcttgtcttttgcatatatcaacttgtagtcctagaaacgggttctctgggccatgcagaatgctggattatttttctgtcatctattatgacagacagactctgtcacttgatcagacataaacttttctttctttagctaagtaatgttcacattttaaagcaattcaagacccaagtccacagaaacagaagggccaacctactctacaaaggcacgttggaagagcatgattgatggaaacttgtaaggagtcaggcaaggtggctcacacctataatccaagccctttgagaagccaaggtgggtggcttggcctcgacctccgcaaaggcttggatttaaaaaagaaaacaaaccagaaaaaaaacaaacaaaaaacaaatcttgtaaggctacactttggaaagaaaatcaaaaacaaattcttcccacagatcacataactgcaaagggggaaacgtgcatttacaatggagagatcagataggtaccacttaaccaagtgcccaaactgggttatcaccaactagaacaaactaagattaccttctgagtattcttgccaaaaacttttaatttaaatcgaatcaagctcttagacttatcttctggtttacaaaaatacagtggattggccaggcgcagtggctcacacctgtaatcccagcactttgggaagccgaggcaggcggatcacaaggtcaggagttcgagaccagcctggccaacatggtgaaaccccatctctactaaaaatacaaaaattagctgggcgtggtggtggatgcctgtaatcccagctactcaggaggctgagacaggagaatcgcttgaacccaggaggcagagattgcagcaagccgagatcgtgccactgcaccccagcctgggtgacaaagagagactccaactcaaaaaaaaaacaaccagaaaactagggaacacatcaaagtgacactaggcaattccagaatgtaggacatgcaataatactggcctgaactctttctcaaagagttactacaatgagcagtggatggggtgagaaagctactaaagactaacagacataaccaaatgtaatatgttattttggggatgggggcagctacaaataacattctgagcaccactggatgaggactggatattagaaagtattatgatcacttctcggccttctggctaagatcaagtattgaaaagattatgaaagtactgttaattttcttagatgcaataatagtactttgattaaacaggagaatgtcattttttaaagagatgtgtgctgaagtatttaaaggttaactgcctggataattatcaacaatttaacgtggctcagtggagaaagcagagccacagttcaaacaaaaaaagcaaaatagtggtaactgttgactccagatggaagataatgcttttattgtgttattcttgcaacttttctgtaagtttgaattttttcataataaaaagttctgggggccaggcatggtggttcacgcctgtaatcccaccactttgggaggccgaggtgggcggatcacgaggtcaggagatttagaccatcctggctaacacagtgaaatcccatctctattaaaaatacaaaaaaaaaaaaaaaaaaaaaaaaattagccaggtgtggtggcaggtgcctgtagtcccagctactcgggaggctgaggcagagcttgcagtgagccgagactgtgtcactgcactccagcctgggcgacagagcaagactccatctcaaaaaaaaaaaaaaaaaagatgtgggaaaagtttggtttgggatgtatctagattgccaactaaacctaaatcaaagtatactaatattaaaaatcctgtaaatgggccaggaattgttacagagggaataaagaccctagcaatgttcacataagaagttaaagcactgcggggtttttctatgcccgtaaagtattctttagtctttggaatcaagaactgcatttagggtcgggtgtggtggctcatgcctgtaatcccaacactttggaattacaaaatcccaggaattagtaactttttttagtgagtctgcaaatgttactgaataagccagccgcaggactgctcatggaaggggaagggaggcacaggagaccgaggtgggaggatcacttgagcccagtagttacagagaccagaccagcctgggaaacatagcgagaccccatccctattaaaaaaaaaaaagaagaagaagaagaaaaagaattgcatttagtctttacctataacgtcctataatgtcataggtgaactaaaagaaatgataaatatatcctcctgttgtctctcaatggctttccaccactttcaaggtccaaattcctcatgcttagtatgactcagaaaagtccataaaacctggctcctgcctctggaatttcagttcttgccactcccaactctacccacaatggacagttctctggaacctgctaagatctcagacaatgctgctcctactggctaggtgcaaagacacaaaaactaagatttcaaaagcaaaaaatcccgggaaaaataatctatcacaacaaaagcatgagctcaggaagaaaagggagtggaggggataagagcaggggagggggaccaaacccaactttgcctcccttccccttccacgagcagcctggtggctggcttgttccgtgtgttcagtaacatttgcaaggaccaaaaaaatcactaattcctaagattgctgttactctcaaacaaaagtcaattcccaagcccacacaccccacagtcaagctgagagttaaaactcagaaaactcaaaggccttaggatactgaccctatgctggcaaccacatagctcagaaatgcaacaaatattaaattatggtgtcctgtaatggatttacactttacttttaaatattaacaagacggccacagggagtaagtttatcaagggataagaatcctaacagtacctcctagttcactcagaggccaattaacatttcccaccacgcccaacaacaaggctcctgggggtgttcaaagttgcttatgaccctgtggagctatcagcaggtacctctgccccagaacctattatgagcaatgcactaggggctcggtgcacaaggaaacacctgaactacaactacccaagcaaatatcatatctttgtaggttgtcgggtttcttcagctgtctgaagatacaaaacctcatgtgactgtttgatttttagtctcttctcaccttggtcttcctttctcacagttatttttaaaatcagcaactggctaatatttgaaaactgtcagtagccaactgtccgtttcacaattagatcactgttcaaaaggagcagaattttcaactctagactttagttcaacaagctagcaaatcattacaggaatgagtgacttcatctttacagctgggtcgctgcactatgaggctacactaaaatatacctaattgttgaattccaacatgtctgtaggccctccccgcatcttcaaggttagagtttttattattgcatcctcccccaacccaacccccccagacaaagcttggcattttcggaatccctactcataaagtgactcagtccaccgatgggccaactgacaaatccttaagggattaagatattaccaggtaaaaagtgacttttaaaaatgtacataatacatatatatgtagagagagagagtgtgtgtgtgtgtgttacaggaaagctattaactatactatgaataaaacaaaatttcactgaaaataaaagtgatcaggtagcactgactacaaccttctaaattccccctaaatgaatccacagaaagactttcttgaagggtcttttgctaatttgcggttagaacacaacacactcaagaaaatgatgctcacagcaggacactaatactaagtaatttctgagattatgtctgcatttgtgctaaataatttatgctaggagcagaaataaaagcagagatgaagttaagctattgattgaagactgtgctaaccccattaaaaataaagagaggtatgaatgtgtgccttcacaactcagctcaggatatacttgccaactgagctcttccttccgtaagaaggcccattgctcttggctactgcgcaggggctatgaaggccccatggttctaggactagagcagatgcgtacaaactccctaaagtcacaggaaggaaggggaggcacaactggagagaagttggtgaactgcctctctggcccataggggcatgagggcggggggcacagaataaaaccataaagcaataattttcactatttaaaagaacaagtctaaatggcacacatcctctgtgtctaagatgactagcactgctgttttttgatgagtcatcaagggcagtcatgctgaaaagcagggatacttctgtattccacctatgtaatcattccaaaattatgggattggaacattacaatacctatgatgtatgtccttatatttgtatgtgtttgtgtgcttacccttaagtggtgttttttgttttgttttgtttttgctgacttctttgttctagggggtatttctgcagccttctcagaaaaacctcagggtattagagaaggtacaacttgctaatggcatctggtgagcatgggctggaaggggaaccaccgggaaacacagttgtcaataaccacacccgctatggtgcaaacatgacccacatacaaactgaagtacaagtacaacccctcccaaaagtctagccctaagataatagcacagaaactaagcctaacaaggtgcttggaacctcttcctacctgcaccaaccaccctctgcacaccatccccagcaagaccccctgcctccaactcccctaaagcagcatttccaggatagcactattctttaatccactgacaactttggcactggctaaggcttactatttttatcccctttcacaccattctctgagcagaaatgctaggtgcaaacatttgttggtaattatgttaaagtaagtcttcttaagaacaaatggtaaaatgaatacatgaaaactttgcaatctatttttgaagaattgtctgcaaaaagagtggaaattgagtttttcttacgcagctgaaaggataaaacaaaaattacatataatcagaacacaatataaaataaggatcgtactcccccaaaattacatctgtatttggctgtgagaggtgaaatatctttgattgattgattgattgattgatttttgggatggagtctcactctaacgccctggctggagtgcaatggtgcaatctcggctcactgccatctccgcctcccaagttgaagcaattctcctgcctcagcctcctgagtagctgggattacaggcatgtgccaccatgcccagctaatttttgtattttttagtagagacaggagtttcaccatgttggtcaggctggtctcgaacccctgacctcaggtgatctgcccgcctcagcctccccaagtgctggaattataggcgtgagtcatcacgcccagcctgaaatatcttttaaatcttgttagcatgtgctctgaaagatatgttccaccttaggacaaacagcaaacaaactttatttcttcagaacacagcaaatggcagggtagagaatcaaatgacactggaagtggggccttgatctcacccctcctgatatggcaagcacacagggcctagagtcctgggctaaactaaaagatgaaggtcaacttggttactaatttcgcagagcaagtccaaggcaatcaaaatagaaaagcaaaaccaaccctggaactcacaaaggactggacacatgtcatggaattatttatagtctaggacaggtgaacaataatttggctggacaagaatgcaggcccttttctgagttcactctcactgttccaagaatgaagatgtcttgctattctagctgcaagacaggcaccagccatgagtccctacgtggtggtgtgcatgctgcctctgaaggacaagcctcataattatctggccaagatatcttgaaagaagcctactaatgcataaaatacataatcactgagccctggaagccatccaggtaccctcgggcctttgggagttggacagacatgtagcaaggacacattctctcaaacttcctcctaacacaagccttaatcaatattaagggttaaaaggtttcatttaacttcgataaagtaggtattagtactctcatagaaaaacaagctgagactcaatcactgctttcatttggcttaacagctcactactaggcttgctactaagaccttgaagatccttggcttccatatccacttcaatataaacattgttagtgctgttactggtaatgggggctggggggaatccccagggttcctggagcacaaagcaaagttccctccattctcctaattacattaatttaatcccttgcccactacatgattacattaaaaggggctgggggtggggagggtaacataaagccaagacccaaagttaaccacaatacaaaaggagagaagaatggatactatgatcttccttttaaactttcattatagctgactgcagaactgctgggatgactcaatagattatgggaaatggcctaaaagtctactggaaaccagactgaactgtggccacatcttaaaaataacctcttgcctctaattttcttctcccccaatttttttgactaaaaagggttttttgctgtttcgttgttgttgtttcgcaatcaccagtcctaaaatgaagctaaaaatttattttcattttatccttggtcattctctagcaccacaatcaagaacattaatgagtctttcctacaataccgaaagttagttaaacaaataccttgtttcccagcactttgggaggccgagacaggcggatcatgaggtcagaagttcgagaccagcctggctaacagggtgaaaccccgtctctactaaaaaaaaaaaaatacaaaaaattagccaggcgtggtggcatgcacctgtagtcccagctactcaggaggctgaggcaggagaatcacttgaacccaggaggcggaggttgcagtgagccgagatcccaccactgcactccaacctgggcaacaaagtgagactacatcttcaaaaaaaacaaaaacaaaaaacaaaaaccttgtttcacacatcagctgaactttcagtggacctgactactgaaccccaaaggacagccaggttttcctttaacacatattgctgccataaaaactgctgttatcaggcaaagaatgaataggttatttaggaaatatggcaaatatttaataactgatttttttcagtatacctgccttgaagcaacagggaaatattacaggacttggcccctaagctcagcaatttgtcaaatgagtaagtggtaaaatcacgctctccaagatacctctcactaaatacatttatcacattccagaagaagaaaactattttgacttgattgctacctttaaactgtccctttttcaggttttctatctatttcaaatgagacaagcttatcctttgattaaaatgccatataataaaatccatcaaatcatattagccagagggtcaacaatccagctattcaatagcattatcattattttactagtagcacaaataagagggctgcatgggctgaagagccatttcaacaagctcttggagtgttctggacacagagaccatgagtgttttggaacataaggctgagctatggagacccttctgcagcaaagaattcctgtcagaaataagactcgatattagaggttgttttaaaaaataataataataaaagcactgatgtgcatcctaggatgtttagcaaaattaaaacttaaaaaatttaaacttaaaaagcagtgaaacatgctgtaacatagatgaaccttgaaaacatgctaagtgaactatgccagaacacaaaagtacaaatattatatgattccatttatctgaggtacccagaataggtaaattcacagacacggaaagtagaatggtgattattagaagttgcggagaaggggactaataataggtggactaataatagaggttgagaaggggactaatttttaataggtgcagagtttctgtttggaatgaagaaatcaagttctggaaacgaatagtagtaatggttgcgtaatattgagaatgtacttaacgccactaaattgtatacttcaaatgatttaaatggtacttttttttttccgtaaagtgaaagcaagtttattaagaaagtaaagaaataaaagaatggctactccataggcaggacaacctaaaatggcctattttatgttatgtatattttaccatatattttaccacaatttaaaaaaactgtacataaaaactagaattataatttaataagttccagcactttggggaggctgacgtgggagaactacctgaggccaggagtttgagaccagcctgggaaacagagttaaaccttatttctaccaaaaacaattagccaggcgtggtggcatgcatctgttgtcccagctactcaggaggctgaggctggaggtttgtttgagcccatgtgttttaggttatagtgagctatgatcacaccactggactccagcctgcgcaacagagcaagaccccatctctaaaaaaaaaaaaaaaaaaaaaaatagtaagaagaacataggtggtaaataataaacttagccggaaggacactgaggttctgtatttaaaattcacgttaagagtcagagcgctacatgcatccgtaatcagaatcaaagaatccacactcccaaagtgacaaaacagccccaaactaatttctctcattttaatgctgcagatccccaaggcccagaccctggacttctcgatctacactcactcccttggtgatctcatccagtctcatgatttcaaataccacctgtttgctggacactcccaaatccttatattgagccctgacttctgcactgagcaccaggattgtagaccaacagcctccctgccatctccactcagaagcctaacagttacctcaaatttgtccaaaaccagatcactgtccttcccgtccacaaacctgttctaccgcagtcttcccatcctggttaatggtaactctacccttttaccctcattccttgtcagttcattctcaattaggcaaccagtggcattccttacaacagcagtcaaattttctaattcctctatttgaaaacctccaagaaaggctgggcgtggtggctcacgcctgtaatcccagcactttggaaggctgaggtgggtgaagggcttgagctcaagagtttaagaccagtttgggcaacctggcaagaccccgtctctacaaaaaatacaaaaattagtccggcatggtggcttgcgcctgtagtcccaggtccttgggaggctaaagtgggaggagcatttgagcctttgaggttgaggttgtagtgagcttccattgcatcactgcactccagcctggacaaaggagccagaccctgtctcaaaaataaataaataaataaaaaccctccaatgaattctcatctcattcagagtacacatcaaactctggacaatggcttacactaaaccaggagtcagaagctgtggtgggtgaatcctgcccagtgcctgccagtgtgaataaagcactgctggacaccctgtgcccctctgtgcactgcctactactgcttcggcattgcaggcagagttgagttgttgctatggactgcagagtcgaaaacgtttacatctggcccttcgcagagcaagtctgtctacaccagctcttaaatgatttcccttatccctctgacctcatctctctagttctgcacctcactcactctgttccagccacacgggccttctcgctgtcctgtcctgaagatacccatgcaagctctcaccacaggccactgacccaaccactgtcttggcagcgctgcccagacaaccacatggcttgctcgcacacctcctgaatacctcacttcagtgagaccttccctcatcacaatatatttaaaattgcaaaatttcctctctctactccctgcaaagcatccactttcctctgcttctccaaagcactaattacctaaaaggacacacaagtttgcctaccacatagcagcagcccaataaatatttgttaaatgtagttaagagtattattagtgagcctaaggcaaaaattcaagattccaattctaggccggcgcagtggctcacatctgcaatcctaacacttcaggaggttaaggcaggaggatcacttgagcccaggagtttaagatcagcctgggcaacataggaaggccccttctctactgacataaaaaaatattagcccggcatggtggtgtgcacctgtagtcccagccagttgggaggctgaggtgggaagtctgcttgagcccaggagttcaaggctgcagtgaactgtgattgcaccactgcactccagcctggttaacagagtgggagaccctgtttctggggaggaaaaaaaaaaagtgacatagaaggacgacatatgcttatatacaacaaatacaaattctcaactaaaagttaaataataaaagttatcctagaaataaactgttttgatttcacaaataatgttctccttagaagttgcaaactatctgcacataaatgtgctctgtttagtctaacaggtattttctggttttccttttatctttaagctgaataaattgtcaggtaaatggtttaatggttgaaagtattaactctggaggagggctagacaggtttaaatttttttttttttttttttttttttggagatggagtctcactctgttgcccaggctggagtgcaatggtgcaatctcggctcactacaacctccgcctcctgggttcaagcgattctcatgtctcagcctcctgagtagctgagattacaggcacccaccatcatgcccggctaatttttgtatttttgtagagatgtcggttcaccatgttggccagcgtggtcttgaactcctgacctcagatgatctgccaacctcagatgatttgcccacctcggcctcccgaatgctgggattacaggcatgagccactgcgcccggcctagacaggtttaaattctagtcagctgaatgacctttggcaaattattcattctgtgtttcctcatccataaaacggggataataatatccctatctcatttgtattgaatgagttaatattggtaaaacatttaagaataaagactgcagccaggcacggtggctcacgcctgtaatcccagcactttgggaggccgaggtgggtggatcacttgaggtcagaagtttgagaccagcctggccaacatagtaaaaccctgtctctactaaaaatacaaaaattagccaggtgtggtggcacatgcttgtaatctcagctacttggaaggctgaggagggaggatcgcttgaacccaggaggtggaggctgcagtgagctgagatcacaccgctgctttccagcctgggcaacagagcaagattccatctcaaaaaaaaaagagcaaagtaatagtacctacctcactgggtcaggaagagaagcaacacatgcagagctctaagggagtcttgtatatggtgagcgctaatgtgttcattcagaatttactttaatttaaaaaaaaagttggctgggcgcggtggctcatgcctctaatcccagcactttgggaggctgaggcaggcggatcacaaggtcaggagatcgagaccatcctggctaacacagtgaaacccggtctctactaaagacacaaaaaaattagctgagcgtggcagtgtgcgcctgtagtcccagctgctggggaggctgagacagcagaatggtgtgaacccaggaggcagagcttgcagtgagccaaggttgcgccactgcactccagcctgggcgatagagcaagactcctcaagaagaaaaaaaagttggtccctgaactgaaagaggccacatatcaaggacataagcacgcaaaatcagcaagtgccatacagtaagtactgatctacaacagaaagaaatcaaggcatacctgcagacttaaacgacatactgaagagccacgtccttgttcaaataattccattccaattccccagagaacagaggtggcatgcggtaggattagagtttcactcagctaagacagaggtttgagtccctgctcggcttagctgtgtgatcttgagctcgtgaccaaacttcttacagtcttaggagagttagaaataacaaatgtagattccagagtgattgaaacagagtaggccttcaggaagtcacagttattatttgtataagcctttcagtttagagtaattttagaattatagaaaagttgtgaatatagtacacagagtttccatgctgttattttattttcaacaatattgttattctgattgtgaagagaggtaaacaatttctaaattacaccttaaaaatccatgacaacaaagaatactgtcactctaggaaacttctgatttatgcacttaaacacaccactccgcatcaggtgaactgatttcccaagtttgttaagatgtgttacacagtttaaaggcagacatgactaagaggctaacatgtgtatcacagacctaggaacactttctccatgttgccgtctctaaaaggaacttcagcaggtgcagtgggtgcctcctctcaactcataccacaaacccaggggcttcaaaaattactttccctctaccagggcccttcaaaacacagtatttcctaaccaacagaaaacgaaaaactctgtgacccagacagcccagcctttgaaagcagcaggggtagcaactgctgagcctcaaaagtcagcctctgagtagccacccagaatgcaatgggctggcaaacagtaggggagaaaaacgctggatccaagcctggatcccagtgctcaccggacaatcatttgtcccatttcctcaattatctgtttgtctcctatagctgtctatcataaaggcaatgtgaaaatattattttaaattttacagaatagaaattacggactcagaagaggcatatccagacaataggtagaaaagtagaaaaataacagctattgtcctagaaatcaaatacaatacacactaacatttagatctgcttttaagagctttcaaaaacctcacgttattagacatttttggatagttttaaaagtcttgttctttaacagtaagaaaaatgcatcccctgaattgaagctttagagtatttaaagtgaaaagcttgctaagagataaatgtgcaaaaaaaaaaaaaaagtagtatttgagcattgcagagggatttctcctttctcctgagctgctgctgtaacatctcctctgactcagcacctaagaggcatgatgggaagggagtactataaaaaagccatgcattattaacaagacatttggcatcaaagcagaatgatttggaaaaccggaaaatgtccgcagaataagagaaaggggagctaacagcttaaattatttttggtagtgtcatgccattcaaaattgtccattctaatcttctaagctgtctttttctcccttagttttagctctaattctgatctctttatgtctttcctaccttacattccaaatggttactacttacattctgagtggatttctctgtgttggtttgctcctgtcagttttaaagaactgctgtacacgcattagatccaatgaagacagactgcaacagaactgctctgcagaagcccaagagataccacacataggatgttaacacttactactgcctagaaatcaagagtctgtcttcttaaccctagaataagcaaccaagtgacctaagttcccaattcacagatggcaagccaatggttaaaaaaaaaatacatttactcttacaaccatttttaggaccctagaatttaccatcaaattgtcagtaaaaaatgaagctgggccaggtggagtggctcatgcctgtaacctcagcactttgggagaccgaggcaagaggacctcttgaggccaagggttcttgctatgttgcataggcaacatagcaagaccttgtctctgcccaaaaaaaaaaaaaaaaaaaaaaaagccaagtgtggtggtgcacacctacagccccagagacccacaaggctgaggtggaaggatcccttcagcccagaagttcgaggctgcaatgagctataattatgcctctatactccagcctgggtgacacagcgagaccccatctttaccaaagaaaaaaaaaagaatgaagctggcatatagtccaatggtcagagacaatgacttgagtaactcaaaatccaattctgcttttctggcattatatcaaattaggaaaactattcccttcctttaggccagtagttctcaattaggggtgcttttgcttcccaggggacatttggcagtatctgggggcatttttcgttgtcaccactgcgggagaaaggtgctactggcatctcttgggtaaaggccacagaggctgcaaaacatcctacaaggcacaggacagcctcaacaacaaagcagcatgtcaacagtgccaaggttgagaaactctgccttagacaaatcacttaacttctactgacttttaaattaaccactgacactgttagaaagtacagcagtaatgcataaacgttaagtttatatttgctggttcacatttattggattaataaacatgctgggcgcggtggctcatgcctgtaatcccagcactttgagaggctgaggtgggcggatcataaggtcagtagttcgagaccagcctggccaacatggtgaaaccctgtctctactaaaaatacaaaaattagccgggtgtggtggcaggcgcgtgtaatcccagctactcgggaggctgaggcaggagaattgcttgaactcgggaggcggaggttgcagtgagccaagattgcaccactgcactccagcctgggtaacagagcaagactctgtcctgggaaaaaataaaaaataaaataaaataaacagataatttattttcgattccctataaactgaatatttcttccttagtaaatggagcacagactagcatcaccttttctgcaacataagtaacaatgcacatgtgcaagatttgcataaagtagcctctgcttctggctatgactgagagcctgtggcagaccagagatccctcagagaaacaactccaacagccagagaaaattaaaaaaaaaaaaattttttttttcaaagtctgaagactttggagaactgtggaagctactatgacttgaagagacacaatccggaagggtaaaccctttaggagcaagccaatatgccacaactgctttgcccctcagggaatctgccaatgctaggtgccaggaaggaggctgaggaaacagaaaagcagcctgggaacatgaccagagccactattcacaggcagagaaaccagcagagctcatggtaatgtctcaggcctgaagaaagaaaaatagagacaagggcctaggattcctgtgaaaagaactgagtgttttaccctgaagacattttacaaaatcccaaagatgcacaggtcagaaggctgaaaccaagcagaaagcctctgaatagcacagcaggtttcttcaccaatcccatgtactaagaagacaaagattaaagttcaggacacaccgtgggggacaaagattaaagttcaggacacaccatgggggaagggccccagttcttagccagaactcctgcagggtacttccaaagagtagaggcaaaccaaaaagagatggagcctgaccaaaaccacgcccttgctgtggtcagctcagacaagataaatggaatcagcccccattctatttgcctagcaaatggtgtaagccatctagatattagaaaatcatctagggtcgctacaatttttttatatacaatgcccacttttcaataaaaattaacaggcatgccaaaagataggacaaaatgagtgtcaaggccgggtgcagtggctcacgcctgtaatcccaacactttgggaggccaagccaggcagatcacctaaggtcaggagttcgagaccagcctgaccaacgtggagaaaccccatctctactaaaattacaaaattgccaggcttggtggcgcgtgcctgtaatcccagctactcaggaggctgaggcaggagaattgcttaagtccgggaggcagaggtggcagtgagccgagatcgtgccattccacttcagcctgggtaacaagagtgaaactccatctcaaaaaaaaaaaaaaaaaacagggtgtaatattttaatattgggtaagacagagcaaaaaaagagaatgattgatccaaaagctatgccatcagaaaacatctagactgaaagctggaggagaaggaaggagaatagaaaaatacagatttgtattgagtgctagcctgagaaaatgtctcagcaaaacagtgtttaggtatccattggatgatacatgcagaaataaacacagatgtcacctctttgacaattatacaggatttatgttacttgatttccaagtaacaaagacagcaaaataatcagaaaaaaaatatttagactcaatgagaaagataagagagatccttaacatactgaggatgaagaacctgataattcttagctcactctcttatcaatctcaaagttaaaatgatcacgggagtggtgtgattcaatggatccgtttctgccccgtgggaactacaatttcacagatacaaatttgtaacatcttttttgatatctaatcaccgatgtgaaaatttttaacatttttaaaccgttttattatgaaaaatttcaaatatacagcaaagttgaaaggattttacagtgaactcccatatactcaccatcttgattccactattaacttgcttatcacaaatatatccattaatccatcttactttgtgacctatttccaagtaaactgcggagatcagtatacttcctgctaaacacttcaacatgcatgttaattaattagattttttttcccttcttggtgtaaaagttcatgcaatgaataggtgtgcatttgcggagtttgacaaatgcacatacctgtgtaatctaaatccctatcaagatatgaaacattacaatcactcctgaaaggtttcccaagcccctttccagtcaatccctacccttatttccctctctcagaataaatgtttttttgtttgtttggagacggggtctcgctacgttgcccaggctgtcctggaactcctggcctcaggttctgaggagctaggtctctaggcatacatagcacaagtgtttttgttgttgttatttgtttgtttgtttttgagacagtctccctctgtcacccaggctggagtgcagtggcatgatctcagctttctgcaacctctgcctcctggcctcaagcaattctcctgcctcaatctcccaagtagctgggattagaagcacacaccactacacctggctacttcttttgtatttttagtagagacagggtttcgccatgttggtcaggctggtctcgaactcctgacctcaagtgatctacctacttccgcctcccaaagtgcggggattacaggcatgagccatcatgcctggccacaagtgttatttttaacccacggcactttgaacaatcttcaagtctctggtgtgaagagacagtcttagaaaagtaatgtttaaaagggataaatagccaggcatggtggtgcatgcctgtaatcccagctactcgggaggctgaggcaggagaatcacttgaatctgggaggcggaggttgcagtaagccgagattgaaccattgcactccagcctgggcaacaacagtgaaactctaactcaaaaaaaaaaaggggggggtgacaattatattttaattataaaatagtaaatgaaaccatattcctgaagctaaatttaatacttacaaaaagttgcaaaaaagttatatctgttacatctttaaatgcatataagccatttaaatggtatcaatctaacagctaattttcaatgaaatgtttagtctcaaagaaggcataccgattgatatgttcaacacaagtattcttgtttcctaaaattctatttttatgaattcatggagacacaaaatatcctagagaagaatccttaccctgaaattgcaatttatctataatttatattccttgaatacctgggtttcccttctgcatataaccaaatggaatcctttcttggcaagaatggattgctgcctctactgtgaactgtagttacctggctctaactggcagacagataatttaacgtaaattagcagattatgcctgtgctctggtcctagaatattatttaagagatagcagataagagtggtaaatgatcaaccgggtgtttgctgaaacttcctggagggttaagtaatttattattaatttttgagactagctatagatgggaaaaatgagtcattctgattaaaatgacggtgcggggcaatcagccagctttagacactgctcctatatcaagtacatgccaggccaggagcaggggctcacgcctgtaatcccaacactttgggaggcagaggtggaaggactgcttgagcccaggagtttgagaccagcctgggcaacatagtgaggccctgtctctacaaaaaaaattttaaattagccaggcgtgatggtactacgtaactgtagtcccagctactcaggaggttaaggtgggaggatcgcttgatcctgggaggttcaaggctgcagtgagccatgattgccacactgcactccagcctgagtgacagagtctcacaaaacaaacaaaaaaaaacccacacgccaaaacatgttcttctgcagtatatggtagagtccacattttcttacaggactgaaaacctgacagtcactttgcctctagactacagttttaacatttttagttagtatataaatctgtacatataatgtaagctcaattacgtttttgaaaaattacacatactcccctaaaaaaagatccagaagaaaaagcaccaaaatgttaacagtgtgttatctttgggttatgaggttttagattgtctttattttccttatgcttcgctgtatttcccaaattttatacactgaatgtattatttttaaaatccaaaataaagataccggggaaaaaacaaaaccctaggcagtgactgacctgtaatgatcaccaaatgactgattttatcacactgtgattatgaagctacaatgaatgaatgccctttgtcctgatttatccttgctgccacccaaaggtacatataacctgattctcctggcaacaacacaccttggcatcccacttaccccatgtctgtaaagaggcctcagacagtaattcaaccatttaaaaactatgtcccctacaattatgctttctcactatcttcagagtattctcacctactgttttttttttaatgtattcactgtagtgtgccttataaaaacaataggtatgttgagtgtgctgtttctatttatacataagcctttcactcccatccaaaagaaaacatcccagcctgggcaacaaagtgagagcctgtctctacaaaagaaaaaaaaaaaagtagccaggcatggtggcgcgtgcctgtagtcccaactactcaggaggctgaggcaggaggatcacctgagcccaggaagtcaaggctgcagtgagctatgatcgcatcactgcattccagcctgggtgacagagcgagaccctgtctcaaaaaacaaaacaaaacaaaaacaatagaaaatatcttggtatcaccatatcatcatccaatgccaactttatgaaaattcctgatgtaaactggtgaaaatccttggaataacaactagaatgggactcagttgtagtgctggcattgcctaggaggctgagtatatcctttaaacctttccatgattctgttttcccacctgtaagatacaggggtaagcccaataattttgagtatcctttccactgaaaacctgtcacactgcctctagactacatttaacgtttttagttagtatataaaactgtacatataatgtaagttcaattatgtttttgaaaaattacacacaccaaaaaaaattatccaaaatgttgcgattcttcagatcctgttgtatcttacacagtcatgtgccgcataatgacgtttcagtcaacgactagctgcatatccaatggtgatcctctaagattataatactgtatttttactataccttttctgtttagatatatttagctacacatttacttacctacagtattcagtacagtaccatgctgtagagatttgtagcctacgaataataggctataccatacagccaaggggtgtaataggctataccatctaggttggtgtaagtacactccatgatgttgccacaatgacaaaatagcttaacaacgcatttctcaggatgtatccccatacttatgcaacatatgactgtgtttgtgaattcatcctgaaaacacatctgagattataatctcccaatagtcagaatatcaatcacggtagcaataacactgactgcatatgcttgccaccacagggactttgctaagttcttcactatcaggtagaaactaatatcaattccaatgaagaaactgaagttcgaacagaatggtccagtaactggcccaaagtcaccaaaccagtaagttgcagagcggggacaagagctaagaatcattaggctccacagctcattgcagtttctctctccaaggtgcaggctaattctccttgtcctaaacaacacaacacagtatctctaccttgctgtttctaaaggccctaaggtagatgactaatagggaagctctctacatctgatttctaggagtctaggaattctgagtataaacgtcttcactattcatggttacatatcatcaagaaacaagcttactttcgccaccactttttaagacattttccaaaagcctgctggcagcagtgtgcgcttatgctcaggtgactagctaggccccagaagtttagagaacagtgcaaatgaggttaaggtgccaggtggactccagggcaggtatgcagctttgcataaagaacaactctttgcataaggggtagcctcaggggaggttccccaatcccagaaagtgaccttacaaatgcctacccacaaacagttaatgaagggaacaaaggcacaacaaaattaatctctgcacctggaagataactcaaagtgacaggatggacacctcactttcgataattagccacctcattagatttacaaaaaaataacagaagtgagatgacctgatcaactaagctagcagaagtctaagccactcttccttgaaaagcagacagcttatgtaaacgtactttttattaacaccctaattttcacatttatttccagaaagaagttagaaaaagtatgttcctcatacttcaaagtgccctttctgtatagagaggcgatgtgcctagatgggaaaagaatgggtttacctaggcttcacacctacctaccaccgatttgcgcatctatttttcttttcccaactataacttttgaaagttatagttgggaaaactgtaacttcctcttcctaaatcaaaggcaaatcaaagtctgggcacggtggctcacacatgtaaccccagcactctgggagggcgaggtgggaaggtcacttgagcccaggaatttgagaccagcctaagcaacacagggagacctagtccctacaaaaaaattttttaaaaagtagctactggtcctagctacttgggagggtgaggtgggaggatcacttgggcccaggaggtaaaggctgcaatgaggtgtgatcacaccactgcactccagccttggtgacacagcaaggccctgctgagaagggaaagggaaagggaaaaggaaagggaaagggaaagggaaagggaaagggaaagggaaagggaaggcaagtttgctctaacacaactgataacacctgggaacaatatgcgcataacctgaactctgcctttgcatatgcacaatttcatccacgaggaaaacccagaaaactacacccagctggaaagacagacagatacacacacacacacacacacccctgaagcatctaccagctactcagttcaccaagtgggtgccacacacatctgatgttagaactctcaatgccatttcagagaaccctccttctaccacttcacaataactcaagctgcaaccctgctgatgctcacttctatgagcaaaccacagatttagattttcaaagtgccatatttacagtattccttaactgcttaacatgtgaacacctgcactgttttcattaggttctttttttttttttttggtgatgagtaactaatgcagtttttgcacacctaactccaatttttcataatctctatggcttttattgaacaatctggcatagtgcagtaattttttttttttttagacagacttttgctcatgttgcccaggctggagtggcacaacacacaaccccctacacaatccccagcccctttcagaatgtcttccacggaactggtccctggtgccaaaaaggttggagaccactgctttatatggattaactcattaaccacagggtgaagtgaacctatcatgacagtctgttgtggtttatttttttttttttttgaggtggagtcttgctctgtcgccaagctggagcgcaatggcgcaatctcggctcactgtaacctccacctcccgggttcaagcgattctcctgcctcagcctcccgagtagctgggattacaagcatatgccaccatgcccggctaattttgtatttttagtagagatggggtttcaccacattggccaggctggtcttgaactcccgacctcaggtgtttggcctcccaaagtgctaggattacaggtgtgagccaccgggcccggccagtgtggtcactgttagaaatgcttatgccatgttatagcagaactatttaatataatcacctttgtagaaaagaataaactgcatgacattaatgatattcccattctgtacatacagatacctttctaaagggtgggggtgggaaaagaaaacaacacattgagtttcaatctaatcatttccaacaactcagaagcaaagaaatatgctgagttttcattatgtctaatgcttccatgtgggatcttccaaagggctaagaaagcctggctcagcctagagaatgccacacaaattaactacagatttaactcctttaccgatgcaaaaggcacgctgtgtcacacagctgtgtatgaagaaacaatggaaataatcgcagtaaatgtatatagttaatgtgaccagggtagcccaactctttggtcctgctcaattgatttgacctatgtcataacagactctcaatcattcaaagtttactcactcttgacaaactagagaaaaaataacaatctagagaaaaataattactaagtccaaacaggtttctgagaagagctttattctactttgtggaatccaatcaaagaaagaaaaaaactaattagacatactgttgtaacatttaatgagatttgaaattcatctatttaaatttattaatagtaaaggaatgagattaaatagacttgacatcgaaggggctagaatttcccatgaagttttccacattatcggtaaagacagcaggtatgttttctttacagctttcaagaatcccttgccagaaataatcttatattaagacaggatgtttcgttatagtggggaaaacagaactggccaggaaaagatcttatagcaaagagattgtaaaagattattctagcacaaatacagatttaaattgctgccatcctttttctcccagcccagcaattcctgaggtgcaaaattttcaaatatctgtgtatacaatgacaaggacacaagtgaaaacacttgtgatgaaagggttatgaataaattactgcaatttccttttatcaaccaagttgatttaatggtttaaaaatattgttcaacagaacaaaggtggtaacatttgttagatcctaattaaacgtgattcattctggaatgtttctgatgacacagcttacataaataatctactgggaagtctactcaaaattcacaatgaagagtcggtttttcacacatataatacaacctgaaactatagcttcaatctatgcagatggttttactattttaattatacaactaattaataccaaaattagatcgatgttgtttaatttgtggctactgaggaatgttactattcacaaatcacaaaatctgtgccaaaataagtcttcaaagggatattgttgcctccttacccttctaagctttgcagtgggctttggtcaaagctgacataaacagctaaagaaattaacaacagagtctcagaagacaaggccaggggagccaaaaggacacaggtgctacacacccaggcagttgttgtctgctcccagagcacctgacttcagcagccacagcacctgctcctcaagcgcagcggcgcctttgagggagcacagcctggaaggtttacccttcgcagagacgcttgctcttggacttctggctgtacattctgagggttcaaatgaaggatgggacaatgggaaagcttaaatcctctggaaacgtcactgtgatcaatggcttcaaccctcctctacctcataccagttcactggagctgctaacactaagtttccttctttatccgcccatctctattccagtggagccccgtgattaagggatggcagaggaaggggacatgtccttttttttttttttttaacagaaaaacactcatttagatacctggtttagtaagacatctgaacaacatgaaacccaactatgtaaaagctttaaaaatccaggttatgaattagcctaaacctgtgcttatgttccattctgtttagaggaagggggatggaatccctttcacctttatatttttcatgacaagtccatggtcacatcaaaaattacttttgtctttaacacagttgaaattattaaatgttatctagacctaaccaaatcctatttccttaatgttatattcaggacagtgaaaaaaatactgttttcttttagcaaagtctgacttttaaggctcagtttttacctgattaaataaactgcccctgcttttgaggttagaaaaattacttttgttcatggggtccattatactgtactattaagtttacttttatatgtttggaaatttccagccgggcgcggtggctcatgcctataatcccagctactcgagaggcagaggcaggcagattacctgaagtcaggagttcaagaccagcctggccaacatggcgaaaccccatctctagtaaaaactacaaaaattagccgggcatggtggcacgcacctgtaatcccagatactcgggaggctgaggtgggagaattgcttgaacctggaaagtggaggttgcagtgagccgagacggtggcaccacactccggcctgggggacagagcaaaactccatctcaaaaaaataaaaaaagaaaaaagaaaatttccataataaaatgaaactcttaaggaaaaaactgctttgaacataaagccaacccaaaaagtagctcttacctaaagtgaattttccctagtgccaaatgaaattcaaataaatcccaatcttctaattcacacaaatcttaagatttctaatactttaaaccagaatgaaaaagtcaggtatgccaaattaacaatcgaagagaaaattaatcccacaccaaagccaaaacattgaacttcctcccactctcgcattcacacacacacacaagcatgaaccacacaatgaaggattccagttgccccatccagacaactggacgcacatcacacacctcctagtcatccagggaccatcttggcagcctgtttctcatcactacctgccaccctgtgcctgtgttgtggacgaggaaggcacgggtagtagcctagctttttatttttttaaatctcagcaatagaggcaaggttatttctaccttacatccaagagtatggagcacaagactagctgtttattaataacatgcttattttccacaccaaccacacggttttccaatttcacaaagtaaatacttcctcatccctctttagaaaagatgaaacaatttatcgtagcctaagcaaaaaccacctatcaaagcaaagactggcaagcagattcaagacataaaggtatagcttttactataaatttgaaaccaacaagaaagccattaacctaaatatttttctaatcaaaaatcagaaatgacgttaatagcaacatataagaattactgtatctaccacacttagaatgtactggggtagatgacaatgacaatcagtactgattgccttatgtttatcaactttttcatctacatttcaggtttcagtgcaagacaaaccattaatacattcatgactagccatttcaaagcattattgtatacatactgtacgacacaaagtgcttaattgtaacttaaaaggttaaaacccatcttgaatcctaaatgggcaaaaaaaaaaaaaaaaaaaaaaccccactagtcatttgcccacaaaccaggccccatataaccatcaagcatctgactgcatcggacatgattaatctgaaactgtgctatgaatcatacagcagtcctcccttatcttcaagggatacgttctgaaattccccagtgggtgcctgaaactgcaggtagtaccagatctaaatacattgctttttcctatacacacatacctatggtaaagtttaaattataaattaggcacagtaaaagatgaataacaatgtaaaaggaaaataaacttggggaccccaaacccactaagtcaaagagaaaagtcaaggtaggaacggcatcatgcaaacctacctccctcacaatctgcccaataggaaattccttgtggacctcaacatccttaccctacaaccactctgctgaatttcaccctgacaacgtaaattgacagcttatcttcacaggtataggacaaaggacagaacttaaagtcattcctctgcttacctgagacaaatgcataatctcatcacttcctctgcccggtaagtatattttgtcttatgtaaaaatgcagattcactgagctagatgaatgcataagggactattcctccgctgccccccacccttgcccgccacatgtgaatagctgatcaaagactcaaaagaatgtaaccatttgcctcctatctaccacgccttcctaaaatttctccccctttaaatactgaagccctcaaaatcatcttaggagaaaggcacagaccttgggcctgggtgcatgcccttaaccttggtaaaataaacttctaaataaattgagacctgtctcagatactttttggtttgcaacaaatataaaatggttttacaatttggtttacaacaacaacaacaacaataaaatggaacaattataacaataataaaagtaattaagtaaagttaatttttctgagagagtctcactctgttgcccaggctggagtgatcatggctcactgctgcctcaaactcccaggctcatgcgatcccaagtagctggggctacaggcatgtgccaccacacctggctaatttttatttgtatttttgtagaaacaagttttcccccaggttgcctaggctggtctcaaactcctgggcttaagcgatcctccagcctcggcctcccaaaatgctgggattacaggcatgagccaccacacctggccataagattaaaattcaaaagtattacaaataataaaattaaaataagggtcacttgaacacaagcactgtgacaccacgatgatgatgtgataatccagacgactactaaatgtgtatacagcgtgggtatgctggacaaaggaatgactcacatcccaggcaagacaaagggggacagagcaggatggtgaaagatttcatcacgccactcagaatggtgcacaatttaaaatttgtgaaatgtttatttctggaattttccatttaatattttcagaactcagtgaaaccacagaaagtgaaactctggataagggggtgactaccttattcactatcattcctggcaattaaagaatgttaactccaactgaacaccagatgaattggccctcaattaaacacatctgtccagaaatataaaatcacccaaaactaaaaatttactaaagtgaagcatgctccttagaagacttaaaaaataacagtgatacactgtctgctttgttcatcactgtatccttcaagtctagcacactgtaggggtgttacacagagattaatgaatttagctataagaaaatagcaaaatcaggcaaatgcaaagatgagtttgtaattttttctcttttatcacaggcaccagaacataaaagttttctaagtacccacccctgcctttaatcaccatttttatcactcacatttagataaatacatttgcagttcagctgatatcagaaaaaaaaatatgtatcaaattgtcaaattttactaagtcagagctgtgggagtccagcagcttttacacgttagatttttctatttcctcattcgtcagcatttgacatcattttctgatgttataaaggataacagaaaaaaaaaccctgtgcacacatcacgcccctcctagtcatctagggaccatcttggcagcctgtttctcttcaccacctgccaccctgtgcctgtgttgtggacgaggaaggcacggggaaacagaatattctggtgaataaagcattactaattttcaaagaattagaaggcaaaaacaaacaaaaaaaacacccacaataccaaactgaaagtcatgcctcagggtctttattgtaactacttaatactaaacaccaaaacataaatgatgctgattaatggagatttggggctaagaaaataccaaacaggctaggcgtggtggctcatgcctgtaatcccagcactttgggaagccaagacaggtggatcaggtgttcaagaccagcctgaccaaaatggtgaaaccccatctctaccaaaaataaaaaaattagctgggggtggtggcatgcgcctgtaaccccagctactcaggaggcggagacaggagaatcacttgaacctaggaggcagaggttgcagtgagttgagatcatgccattgcactacagcctgggtgacagtaagattccacctcaaaaaacaacaacaaaaaaaggaaataccaaacaaaatgtgcttttccctatcttcgaaatcatcatgtcttttcattcctgtatggcaaaaaataaatcccgtgtcgcctgccgaatccgaatctaaataaatgaataaagacagagaataataaagaaagaaaacagcttcaaacttaaacacgttagagcaagagaaacaaacaaacaaaaaaaaccatgactcctgctttctcaaaaatcacatcagtagcttataaagaccttcatgggcagaaaaagaatgggcacactgtagggagcaaaaggtaagtgataatatttacaaagtagtgtattttaaaagcataaacaaaaaattaggtaaattgggcctcattaaaaacttttttgtgcatcaaaggacactatcagaagtgaaaagacaacccacagaatagaaaatatttgtaaatcatgtatctgataaaggtttaatattattcagaatccgtaaagaactcctaacaggccgggcatggtggctcatgcctgtaatcccagcactctgggaggcgggggtgggaggatggcttcagtccacgagtttgagaccggcctgggcaacatagggcaatcccatctctacaaataatgtaaaaatcagccgggcttgctggcacgcactggtggtctcagctgcttgggaggctgaggtgagagaactacttgagcctgagaggttgaggctgcagtgagccgtgatagtgccactgcactccagcatgggcaacagagcgagagtccatctcaaaaaacaaaaaaaaaccctaaaaaatagtgattactggccaggcgcggtggctcacgcctgtaatgtcagcactttgggaggctgaggcgggcggatcatgaggtcaggagatcaagaccatcctggctgacacgatgaaaccccgtctctactaaaaatacaaaaaaattagccgggcgtggtggtgggtgcctgtagtcccagctactcgacagtctgaggcaggagaatggcacgaacccgggaggcggagcttgcagtgagaccagatggcgccactgcactccagcctgggcgagactccgtctcaaaaaaaaaaaaaaaaaaaagtgattactgcataacattatgaatgtaatttatgccactaaactgtacacttaattacttaaattactaaaatagatacatggcaaatttcatattttaccaccaaaagaagaaaaatgtacaaagtagatttggaaaaaattaattcagtcacttcaaaatcaggattaattaattcctttccccaaagtaaatgcagtccaacgaccaagaggctggtctgcccagacaatagtttcttctttcatttcattaaatatttaagtacatacaacgtgctgggcaccatcctaggcacaaggaaattacaatccagaaaacttccctctcatgactatatagattatgaggatatgggtcaaatgagcttttctaaaaaagttaaagcattaaatgcttttatttaaaacatacagattcagccgggcatggtggctcaagcctgtaatcccagcactttaggagcccaaggcaggtggatcacctgaggtcaggagttcgagaccagcctggctaacacggcaaagccgcatttctactaaaaaaaaaaaaaatagccaggggtcatggtgctcgcctgtaatcccagctactcaggaggctgaggcagcagtatcacacgaacccaggaagcaggggttgcagtgagccctgatcgcaccactgcactccagcctgggcaactgagtgagactccatctcaggaaaaaaaaaaaaatacagattcaaaataactatatcatgaatcctaaagtcagtctactatcatttttggtctatctggtttgacttccttaggttggcaattctgtcatttttctgaacaggaataaaacatttttttcctttttcaattacataagcaagacacaacacagtatttaggaaaacactattttatgaccttcaccagccaagtctaccaatcagcaaatacacacatcctgatcaggaatacaatttaggcttggttcctgaaagtagaacttaaaatgggataatgagcagctctgtgaggaaaaaataaccctgtctctccatcttcccaagcttatgattgttcaacacagtagaattaagaagaaggtttaaatgtcaattatccatacttttaggactacttgggagggggtggaaaaagttacctctttactgatatttaaatatcctacaactttttaataaaaataatatacagttgtgctcactagcataccctggatccactgacatgtaaaaacacaacattgcggccgggcgcggtggctcacgcctgtaatcccagcactttgggaggccgaggtgggcggatcacgaggtcaggagatcgagaccatcccggctaaaacggtgaaaccccgtctctactaaaaatacaaaaaattagccgggcgtagtggcgggcgcctgtagtcccagctacttgggaggctgaggcaggagaatggcgtgaacccgggaggcggagcttgcagtgagccgagatcccgccactgcactccagcctgggcgacagagcaagactctgtctcaaaaaaaaaacaaaaaaaaacaaaaaaaaaccacaacattgctgtcttacaacctactctttccggtacccaatactccacaatatttttcatctttataattaggctactaaccacctaagagaactgttcataattgatgacagtaatgaaggtgcctcagaaacaatgaacaggttcgcttctgattgctgcaaagtacctgggtagctccgtcacctgcaaaggcagaggaacaatacccagggtctaataattgcttactcaaactaacaaaaggagaaaaaaaaaagaggaagtagagaaggggcagcactctaaattatttaatgtgattcccatgcttgggaaaacactgaattcatgcaaccagcaggagctggaatgctcctcagtataaaaggcaccatataaaaagaattactgaatccaaatgcaatattcattttcatttaacatccaactacctagaggattgaggtaatgagtctggggctctatttcacacttaaaagctgaagtgtgaagccagaggaaaggactggcttagcagatcaaaatgtaaaaggattagcccacaggacaaaaaaaatggtccaaaaaaaggaaaaaatggtcttaacatcccaaagatatttccaaaaattctttctgattttctttcctttgaccaagacagcacaattttccctcccttccttagtgacaatgatttcaaagacagatttccatgtagagacacgaagtctggagttcccaggctaatgtccgaaagcaatggcactgcacagtggggaccttgccattcaccccaaagactgaaactataaagtctgaagattacacacaagcatgtcaccattctcaccgcagcagtctggggaggagatgaagtcaacgggaaatcagaactttaaaagacagtgtctttacttgacaaaatgattccttctttacttcaaaggttcaattcacacatgctcagaatcatgaaacttcagatctgaaagggaccctagaatctgcacaatagtccagtctcctcagttcacagaaaacaggaaaaaaaattcatacctagttattggtaaagtcagacaggagcccaaacctaatctcagtttaatatgagcatgagaccaagagggcacctcctatggttataaataagaatcataaggccgggtgcagtggctcacacctgtaatcccagcactttggaaggccaaggaggacggatcacctgaggtctggagttagagaccagcctggctaacatggtgaaaccccatctctactaaaaatacaaaaaaaaaaaaaaaaattagctgggcatggttgcaggtgcctgtaatcccagctactcaggagggtgaagcagattgagaatcacttgaacccaggaggcggaggttgcagtgagccaagatcgcaccatagaactccagtctgggcaacaagagagcgaaactccatctcaaaaaaaaaaaaaaaatcataaacataaggacctttgtgtcaagctctgtgctaagcccttttatgtgcatattctacttaattctgacaagtagcctgagaaaggtagtatcctctatttgaaaacaaaatgaatctgcccactccaagctgatctgaacccagatctcttttcaaccacattgtatgtgcttcaggaatatcttaataattctcaactttgggcaagttaatgactcaacttgacttatatgatcatctataaattgacagatgtagtcaaaagtttagaattcaaagatc

SEQ ID NO: 279 - protein, 388 aa, Homo sapiens
MRARRGLLRLPRRSLLAALFFFSLSSSLLYFVYVAPGIVNTYLFMMQAQGILIRDNVRTIGAQVYEQVLRSAYAKRNSSVNDSDYPLDLNHSETFLQTTTFLPEDFTYFANHTCPERLPSMKGPIDINMSEIGMDYIHELFSKDPTIKLGGHWKPSDCMPRWKVAILIPFRNRHEHLPVLFRHLLPMLQRQRLQFAFYVVEQVGTQPFNRAMLFNVGFQEAMKDLDWDCLIFHDVDHIPESDRNYYGCGQMPRHFATKLDKYMYLLPYTEFFGGVSGLTVEQFRKINGFPNAFWGWGGEDDDLWNRVQNAGYSVSRPEGDTGKYKSIPHHHRGEVQFLGRYALLRKSKERQGLDGLNNLNYFANITYDALYKNITVNLTPELAQVNEY

SEQ ID NO: 280 - DNA, 464 bp, Homo sapiens
tgcccagagagcaagtttatttggtgaatgctgacggcaaacatcatccaagagagacaagatgggaaagttgctgagacaagaaagcctagggaaactttaggctagatacaaaattcacacagggaaaggcacggactctggggagactgggaaggtcctcagccattcagcaccatgcggacgagctctgtggaaaggaaaggtgggatgagccagggaacagggctgtggaggggtacgccaagggccaggggactaccagactgcaaaggtagcataagcgggaacatgcccacagcaaccaaccctggggtcagtttgcagaggagccaccttgagtctgaccagttctccatgcccctagctcccctcccagcagctgttagtcccccacccaaacctaagcagcaagaacacagcagaggcagaaaagttctccactacacctacagctactgtca

SEQ ID NO: 281 - protein, 151 aa, Homo sapiens
MCDFTEDQTAEFKEAFQLFDRTGDGKILYSQCGDVMRALGQNPTNAEVLKVLGNPKSDEMNVKVLDFEHFLPMLQTVAKNKDQGTYEDYVEGLRVFDKEGNGTVMGAEIRHVLVTLGEKMTEEEVEMLVAGHEDSNGCINYEAFVRHILSG

SEQ ID NO: 282 - DNA, 895 bp, Homo sapiens
gcggccgcgtcgaccggcgcggctggagcgcagcgccgaagggactggcagggctgaagtgtgcgggacagcaagcccccgaatagccccggctgccacctcgcaggacccaaggccacgcgcgccgggcccagctgagccgcctcatgaagccgcccgcggaggacctgtcggacgcgctgtgcgagtttgacgcggtgctggccgacttcgcgtcgcccttccacgagcgccacttccactacgaggagcacctggagcgcatgaagcggcgcagcagcgccagtgtcagcgacagcagcggcttcagcgactcggagagtgcagattcactttataggaacagcttcagcttcagtgatgaaaaactgaattctccaacagactctaccccagctcttctctctgccactgtcactcctcagaaagctaaattaggagacacaaaagagctagaagccttcattgctgatcttgacaaaactttagcaagtatgtgaaacaagaagttctgggtcctttcatcataagggagaagcttcagaaagttccgaggacctgctaaaatcagctactagaatctgctgccagaggggacaaagacgtgcactcaaccttctaccaggccactctcaggctcaccttaaaatcagcccttgatcccatttctgggcaatttagacagtgaaactgactttgtttacctgcttgcagcatattagaacagacgatccatgctaatattgtattttctcttaaaacatagctttcctgtaatttaaagtgcttttatgaaaatatttgtaattaattatatatagttggaaatagcagtaagctttcccattataatatatttttgtatacaaataaaatttgaactgaacctcgtgcc

SEQ ID NO: 283 - protein, 117 aa, Homo sapiens
MKPPAEDLSDALCEFDAVLADFASPFHERHFHYEEHLERMKRRSSASVSDSSGFSDSESADSLYRNSFSFSDEKLNSPTDSTPALLSATVTPQKAKLGDTKELEAFIADLDKTLASM

SEQ ID NO: 284 - DNA, 742 bp, Homo sapiens
gagctgctcagttaggacccagagggaaccatggaaaccccagcgcagcttctcttcctcctgctactctggctcccagataccaccggagaacttgtgttgacgcagtttccaggcaccctgtctttgtctccagggaaagagccaccctctcctgcagggccagtcagaatgttagaagcaactacttagcctggtaccagcaaaaacatggccaggctcccaggctcctcatctttggtgcatccagcagggccactggcatcccagacaggttcagtggcagtgggtctgggacggacttcactctcaccatcagcagactggagcctgaagattttgcagtgtattactgtcagcagtatggcggctcacccctttttggccagggaccaagttggagatcaaacgaactgtggctgcaccatctgtcttcatcttcccgccatctgatgagcagttgaaatctggaactgcctctgttgtgttgcctgctgaataacttctatcccagagaggccaaagtacagtggaacggtggataacgccctccaatcgggtaactccccaggagagtggtcaccagagcaggacagcaaggacaagaccttacagcctcagcagcacccctgaacgctgagcaaaggcagacttacgagaaaccaccaaagtcttacagcctgcgaagtcaccccatcagggcctgagctcgccccgttacaaagagttcacaggggacagt

SEQ ID NO: 285 - protein, 236 aa, Homo sapiens [sequence omitted]

SEQ ID NO: 286 - DNA, 3257 bp, Homo sapiens
ccgggcgcgccacacttcctgttgatccggctcggccgggggctgggccggcgggcaggcggcggcggccactggccaggcgtggacgcgcgcggggccgccgcgggcacggagtggccgccgcgtcgcctgagcccagagccggggagtgctctcggccgccgcgtctcctgccctctgtccttccaacccagccctcggctgagccgcgccgcaccatgcccgccgtggacaagctcctgctagaggaggcgttgcaggacagcccccagactcgctctttactgagcgtgtttgaagaagatgctggcaccctcacagactataccaaccagctgctccaggcaatgcagcgcgtctatggagcccagaatgagatgtgcctggccacacaacagctttctaagcaactgctggcatatgaaaaacagaactttgctcttggcaaaggtgatgaagaagtaatttcaacactccactatttttccaaagtggtggatgagcttaatcttctccatacagagctggctaaacagttggcagacacaatggttctacctatcatacaattccgagaaaaggatctcacagaagtaagcactttaaaggatctatttggactcgctagcaatgagcatgacctctcaatggcaaaatacagcaggctgcctaagaaaaaggagaatgagaaggtgaagaccgaagtcggaaaagaggtggccgcggcccggcggaagcagcacctctcctcccttcagtactactgtgccctcaacgcgctgcagtacagaaagcaaatggccatgatggagcccatgataggctttgcccatggacagattaacttttttaagaagggagcagagatgttttccaaacgtatggacagctttttatcctccgttgcagacatggttcaaagcattcaggtagaactggaagccgaggcggaaaagatgcgggtgtcccagcaagaattactttctgttgatgaatctgtttacactccagactctgatgtggccgcaccacagatcaacaggaacctcatccagaaggctggttaccttaatcttagaaacaaaacagggctggtcaccaccacctgggagaggctttatttcttcacccaaggcgggaatctcatgtgtcagcccaggggagccgtggctggaggtttgatccaggacctggacaactgctcagtgatggccgtggattgcgaagaccggcgctactgcttccagatcaccacgcccaatggaaaatcgggaataatcctccaggctgagagcagaaaggaaaatgaagagtggatatgtgcaataaacaacatctccagacagatctacctgaccgacaaccctgaggcagtcgcgatcaagttgaatcagaccgctctgcaagcagtgactcccattacaagttttggaaaaaaacaagaaagctcatgccccagccagaacctgaaaaattcagagatggaaaatgaaaatgacaagattgttcccaaagcaacagccagtctacctgaagcagaggagctgatcgcgcctggaacgccgattcaattcgatattgtgcttcctgctacagaattccttgatcagaacagagggagcaggcgtaccaacccttttggtgaaactgaggatgaatcatttccagaagcagaagattctcttttgcagcagatgtttatagttcggtttttgggatcaatggcagttaaaacagacagcactactgaagtgatttatgaagcgatgagacaagtattggctgctcgggctattcataacatcttccgcatgacagaatcccatctgatggtcaccagtcaatctttgaggttgatagatccacagactcaagtatcaagggccaattttgaacttaccagtgtcacacaatttgctgctcatcaagaaaacaagagactggttggttttgtcatccgtgttcctgaatccactggagaagaatctctgagtacatacatttttgaaagcaactcagaaggcgaaaagatatgttatgctattaatttgggaaaagaaattattgaggttcagaaggatccagaagcactggctcaattaatgctgtccataccactaaccaatgatggaaaatatgtactgttaaacgatcaaccagatgacgatgatggaaatccaaatgaacatagaggcgcagaatccgaagcataactcacttgcgcctgtgggggaagagcaaacaggaaggagagctacctcctaagggttttaacgtctctgacatacaggcacactgacctgatttccgaaggctgacaatcgtttgtggaatgtaatcttgatgccttgatactgagacttgggagggaaactaagaaatggttgacagcgttcccacccatctacaatgttattttaggtgctttgtggtaagtcttttttcttagattgcgctaaaatttcttagattgttcagcgctcagaacaaaagtttgaaaaatgcattgttcatatgaatgtcatctcttttcagtttccagtatcctttttaaaaaatggcaaaagcctagatttacaatttgatgaacactaaatatttcttattaatataatctatttttgtattttacttaatgagctttaagtgcctgtcgttctgaaaattgtgtatttataattcagcttatctcacaattggacctaatagcatttctttgtgcagttaggtgacgagcactgctttgaggcccaagcactagtagagatgcgcgatacaggtctagtttcggtaactgttccagacatcaagcaataaaaaaatgaataccacaaaagatgtttgattttacagtggagccttactgaaccagcattcagaagtttaaggtcctcctaggtatgagtatttttagtagtggatcactgtggacagggtgcagctctaccagttcctgtttcttctgagccagaccctcttcagggaagggaccaattaattttaaaactcacttgaagcacagctggtcatggggcttggtataaagttcctatttccaccctgatacttccaattcctggaaccccagcccactcccccatccctcctccctatcaaactagtataatgattttgaatcggtacagtgtgtttaactgtaactaagttcaacagactattattatctttgtaataaattaacctagcaataaaaattattctgtttctttaaaaaaaaaaaaaaaaaaaaaaaaaaa

SEQ ID NO: 287 - protein, 664 aa, Homo sapiens
MPAVDKLLLEEALQDSPQTRSLLSVFEEDAGTLTDYTNQLLQAMQRVYGAQNEMCLATQQLSKQLLAYEKQNFALGKGDEEVISTLHYFSKVVDELNLLHTELAKQLADTMVLPIIQFREKDLTEVSTLKDLFGLASNEHDLSMAKYSRLPKKKENEKVKTEVGKEVAAARRKQHLSSLQYYCALNALQYRKQMAMMEPMIGFAHGQINFFKKGAEMFSKRMDSFLSSVADMVQSIQVELEAEAEKMRVSQQELLSVDESVYTPDSDVAAPQINRNLIQKAGYLNLRNKTGLVTTTWERLYFFTQGGNLMCQPRGAVAGGLIQDLDNCSVMAVDCEDRRYCFQITTPNGKSGIILQAESRKENEEWICAINNISRQIYLTDNPEAVAIKLNQTALQAVTPITSFGKKQESSCPSQNLKNSEMENENDKIVPKATASLPEAEELIAPGTPIQFDIVLPATEFLDQNRGSRRTNPFGETEDESFPEAEDSLLQQMFIVRFLGSMAVKTDSTTEVIYEAMRQVLAARAIHNIFRMTESHLMVTSQSLRLIDPQTQVSRANFELTSVTQFAAHQENKRLVGFVIRVPESTGEESLSTYIFESNSEGEKICYAINLGKEIIEVQKDPEALAQLMLSIPLTNDGKYVLLNDQPDDDDGNPNEHRGAESEA

SEQ ID NO: 288 - DNA, 1042 bp, Homo sapiens
cgattccgcacgtcccttacccgcttcactagtcccggcattcttcgctgttttcctaactcgcccgcttgactagcgccctggaacagccatttgggtcgtggagtgcgagcacggccggccaatcgccgagtcagagggccaggaggggcgcggccattcgccgcccggcccctgctccgtggctggttttctccgcgggcgcctcgggcggaacctggagataatgggcagcacctgggggagccctggctgggtgcggctcgctctttgcctgacgggcttagtgctctcgctctacgcgctgcacgtgaaggcggcgcgcgcccgggaccgggattaccgcgcgctctgcgacgtgggcaccgccatcagctgttcgcgcgtcttctcctccaggtggggcaggggtttcgggctggtggagcatgtgctgggacaggacagcatcctcaatcaatccaacagcatattcggttgcatcttctacacactacagctattgttaggttgcctgcggacacgctgggcctctgtcctgatgctgctgagctccctggtgtctctcgctggttctgtctacctggcctggatcctgttcttcgtgctctatgatttctgcattgtttgtatcaccacctatgctatcaacgtgagcctgatgtggctcagtttccggaaggtccaagaaccccagggcaaggctaagaggcactgagccctcaacccaagccaggctgacctcatctgctttgctttggcatgtgagccttgcctaagggggcatatctgggtccctagaaggccctagatgtggggcttctagattaccccctcctcctgccatacccgcacatgacaatggaccaaatgtgccacacgctcgctcttttttacacccagtgcctctgactctgtccccatgggctggtctccaaagctctttccattgcccagggagggaaggttctgagcaataaagtttcttagatcaatcaaaaaaaaaaaaaaaaaaaaaaaaaaaaaaaaaaaaaaaaaaaaa

SEQ ID NO: 289 - protein, 163 aa, Homo sapiens
MGSTWGSPGWVRLALCLTGLVLSLYALHVKAARARDRDYRALCDVGTAISCSRVFSSRWGRGFGLVEHVLGQDSILNQSNSIFGCIFYTLQLLLGCLRTRWASVLMLLSSLVSLAGSVYLAWILFFVLYDFCIVCITTYAINVSLMWLSFRKVQEPQGKAKRH

SEQ ID NO: 290 - DNA, 9517 bp, Homo sapiens
gttgctgtcggagagagaaagccgcacccgagaggaggtgtgggtgttccgcttccatcctaacggaacgagctccctcttcgcggacatgggattacccagcggctgctaacccctctcctcgccctgctcccccaaaccggcgtggctccccgggcaccaaggagctgactacagaggagcaggatttgcacccctcgctgggcttgctttggcaacagagtgcctgacccaggtcaggattttcaagaaagacatgtctgacaaaatgtctagcttcctacatattggagacatttgttctctgtacgcggagggatcgacaaatggatttattagcaccttgggcctggttgatgatcgttgtgttgtacagccagaaaccggggaccttaacaatccacctaagaaattcagagactgcctctttaagctatgtcccatgaaccgctactctgcccaaaagcagttctggaaagccgctaagcctggggccaacagcaccacagacgcagtgctactcaacaaactgcaccacgctgcagacttggaaaagaagcagaatgagacagaaaacaggaaattgctggggaccgtaatccagtatggcaatgtgatccagctcctgcatttgaaaagtaataaatacctaacagtgaataagaggcttcctgctctgttggagaagaatgccatgagagtcacattggacgaggctggaaatgaagggtcctggttttatattcagccattctacaagctgcgatccattggagacagcgtggtcataggtgacaaggtggttctgaaccccgtcaatgctggtcagcccctacatgctagcagccatcaactggtagataacccaggctgcaatgaggtcaattccgtcaactgcaatacaagctggaaaatagtccttttcatgaaatggagtgataacaaagacgacatattaaaggggggtgacgtggtgaggctgtttcatgctgagcaggagaagtttctcacctgtgacgaacacaggaagaagcagcacgtcttcctgagaaccacgggccggcagtcggccacatctgccaccagttcaaaagccctgtgggaggtggaggtggtccagcatgacccatgtcggggcggagcagggtattggaacagccttttccgtttcaagcatctggccacggggcattacttggcagcagaggtggaccctgatcaggacgcctctcgaagtaggttgcggaatgcccaagaaaagatggtatactccctggtctctgtgcctgaaggcaatgacatctcctccattttcgagctagatcccaccactctgcgtggaggtgacagccttgtcccaaggaactcttatgttcggctcagacacctatgtactaatacctgggttcacagcacaaatattcctattgacaaggaagaagaaaagcccgtgatgctgaaaattggcacctctcctgtgaaggaggataaggaagcatttgccatagttccggtttctcctgctgaagttcgggacctggactttgccaatgatgccagcaaggtgctgggctccattgctgggaagctagagaagggcaccatcacccagaatgaaaggaggtctgtaaccaagctgctagaagatttggtttacttcgtcactggtggaactaattctggtcaagatgttctcgaagttgtcttctccaagcccaacagagaacggcagaaactgatgagagaacagaatattctcaagcagatcttcaagttgttacaagccccattcacagactgcggtgatggcccaatgcttcggctggaagagctcggggaccagcggcacgctcctttcagacacatctgccggctctgctacagggtgctgagacactcgcagcaagactacaggaagaaccaggagtatatagccaagcagtttggcttcatgcagaagcagattggctatgatgtgttggctgaagacactatcactgccctgctccacaataatcggaaactcctggaaaaacacattaccgcggcagagattgacacatttgtcagcctggtgcgaaagaacagggagcccagattcttagattacctctccgacctctgtgtctccatgaacaaatcaattccagtgacccaggaactgatatgtaaagctgtgctgaaccccaccaacgctgacatcctgattgagaccaaattggttctttctcgttttgaatttgaaggtgtctcttccactggagagaatgctctggaggcaggagaagacgaggaagaggtgtggctgttttggagggacagcaacaaagagattcgcagcaagagtgtgagggaattggctcaggatgctaaagaagggcagaaggaggaccgagacgttctcagctactacagatatcagctgaacctctttgcgaggatgtgtctggaccgccaatacctggccatcaacgaaatctcaggccagctggatgtcgatctcattctccgctgcatgtctgacgagaacctgccctatgacctcagggcgtccttctgccgcctcatgcttcacatgcatgtggaccgagatccccaggaacaagtcacccccgtgaaatatgcccgcctctggtcggagattccctcggagatcgccattgacgactatgatagtagtggagcttccaaagatgaaattaaggagagatttgctcagaccatggagtttgtggaggagtatttaagagatgtggtttgtcagaggttccctttctctgataaagagaagaataagcttacgtttgaggttgtaaatttagctaggaatctcatatactttggtttctacaacttctctgaccttctccgattaactaagatccttctggccatattggactgtgtacatgtgacaacaatcttccccattagcaagatggcgaaaggagaagagaataaaggcagtaacgtgatgagatctattcatggcgtgggagagctgatgacccaggtggtgctccggggaggaggctttttgcccatgactcccatggctgctgcccctgaaggcaatgtgaagcaggcagagcctgagaaggaggacatcatggtcatggacaccaagctgaagatcattgagatactccagtttattttgaatgtgaggttggattataggatctcctgcctcctgtgtatatttaagcgagagtttgatgaaagcaattcccagacttcagaaacatcctccggaaacagcagccaagaagggccaagtaatgtaccaggtgctcttgactttgaacacattgaagaacaagcagaaggcatctttggaggaagtgaggagaacaccccactggacttggatgaccacggcggcagaacctttctccgtgtcctgctccacttgacgatgcatgactacccacccctggtgtcaggggccctgcagctcctcttccggcacttcagccagaggcaggaggtgctccaggccttcaaacaggttcaactgctggttaccagccaagatgtggacaactacaaacagatcaaacaagacttggatcaactgaggtccatcgtggaaaagtcagagctttgggtgtacaaagggcagggccccgatgagactatggatggtgcatctggagaaaatgaacataagaaaacggaggagggaaataacaagccacaaaagcatgaaagcaccagcagctacaactacagagtggtcaaagagattttgattcggcttagcaaactctgtgttcaagagagtgcctcagtgagaaagagcaggaagcagcaacagcgtctgctccggaacatgggcgcgcacgccgtggtgctggagctgctgcagattccctatgagaaggccgaagataccaagatgcaagagataatgaggttggctcatgaatttttgcagaatttctgcgcaggcaaccagcagaatcaagctttgctacataaacacataaacctgtttctcaacccagggatcctggaggcagtaaccatgcagcacatcttcatgaacaatttccagctttgcagtgagatcaacgagagagttgttcagcacttcgttcactgcatagagactcacggtcggaatgtccagtatataaagttcttacagacaattgtcaaggcagaagggaaatttattaaaaaatgccaagacatggttatggccgagctggtcaattcgggagaggatgtcctcgtgttctacaacgacagagcctctttccagactctgatccagatgatgcggtcagaacgggatcggatggatgagaacagccctctcatgtaccacatccacttggtcgagctcctggctgtgtgcacggagggtaagaatgtctacacagagatcaagtgcaactccctgctcccgctggatgacatcgttcgcgtggtgacccacgaggactgcatccctgaggttaaaattgcatacattaacttcctgaatcactgctatgtggatacagaggtggaaatgaaggagatttataccagcaatcacatgtggaaattgtttgagaatttccttgtagacatctgcagggcctgtaacaacactagtgacaggaaacatgcagactcgattttggagaagtatgtcaccgaaatcgtcatgagtattgttactactttcttcagctctcccttctcagaccagagtacgactttgcagactcgccagcctgtctttgtgcaactgctgcaaggcgtgttcagggtttaccactgcaactggttaatgccaagccaaaaagcctccgtggagagctgtattcgggtgctgtctgatgtagccaagagccgggccattgccattcccgtggacctggacagccaagtcaacaacctctttctcaagtcccacagcattgtgcagaaaacagccatgaactggcggctctcagcccgcaatgccgcacgcagggactctgttctggcagcttccagagactaccggaatatcattgagagattgcaggacatcgtctccgcgctggaggaccgtctcaggcccctggtgcaggcagagttatctgtgctcgtggatgttctccacagacccgagctgcttttcccagagaacacagacgccagaaggaaatgtgaaagtggcggtttcatttgcaagttaataaagcatacaaaacagctgctagaagaaaatgaagagaagctctgcattaaggtcctacagaccctgagggaaatgatgaccaaagatagaggctatggagaaaagggtgaggcgctcaggcaagttctggtcaaccgttactatggaaacgtcagaccttcgggacgaagagagagccttaccagctttggcaatggcccactgtcagcaggaggacccggcaagcccgggggaggagggggaggttccggatccagctctatgagcaggggtgagatgagtctggccgaggttcagtgtcaccttgacaaggagggggcttccaatctagttatcgacctcatcatgaacgcatccagtgaccgagtgttccatgaaagcattctcctggccattgcccttctggaaggaggcaacaccaccatccagcactcctttttctgtcgcttgacagaagataagaagtcagagaaattctttaaggtgttttatgaccggatgaaggtggcccagcaagaaatcaaagcaacagtgacagtgaacaccagtgacttgggaaataaaaagaaagacgatgaggtagacagggatgccccatcacggaaaaaagctaaagagcccacaacacagataacagaagaggtccgggatcagctcctggaggcctccgctgccaccaggaaagccttcaccactttcaggagggaggctgatcccgacgaccactaccagcctggagagggcacccaggccactgccgacaaggccaaggacgacctggagatgagcgcggtcatcaccatcatgcagcccatcctccgcttccttcagctcctgtgtgaaaaccacaaccgagacctgcagaacttcctccgttgccaaaataacaagaccaactacaatttggtatgtgagaccctgcagtttctggactgtatttgtggaagcacaactggaggccttggtcttctgggcttgtatataaatgaaaagaacgtagcgcttatcaaccaaaccctggaaagtctgaccgaatactgtcaaggaccttgccatgagaaccagaactgcatagccacccatgaatccaatggcattgacatcatcacagccctgatcctcaatgatatcaatcctttgggaaagaagaggatggaccttgtgttagaactgaagaacaatgcctcgaagttgctcctggccatcatggaaagcaggcacgacagtgaaaacgcagagaggatactttataacatgaggcccaaggaactggtggaagtgatcaagaaagcctacatgcaaggtgaagtggaatttgaggatggagaaaacggtgaggatggggcggcgtcccccaggaacgtggggcacaacatctacatattagcccatcagttggctcggcataacaaagaacttcagagcatgctgaaacctggtggccaagtggacggagatgaagccctggagttttatgccaagcacacggcgcagatagagattgtcagattagaccgaacaatggaacagatagtctttcccgtgcccagcatatgtgaattcctaaccaaggagtcaaaactacgaatttactatactacagagagagacgaacaaggcagcaaaatcaatgatttctttctgcggtctgaagacctcttcaatgaaatgaattggcagaagaaactgagagcccagcccgtgttgtactggtgtgcccgcaacatgtctttctggagcagcatttcgtttaacctggccgtcctgatgaacctgctggtggcgtttttctacccgtttaagggagtccgaggaggaaccctggagccccactggtcgggactcctgtggacagccatgctcatctctctggccatcgtcattgccctccccaagccccatggcatccgggccttaattgcctccacaattctacgactgatattttcagtcgggttacaacccacgttgtttcttctgggcgctttcaatgtatgcaataaaatcatctttctaatgagctttgtgggcaactgtgggacattcacaagaggctaccgagccatggttctggatgttgagttcctctatcatttgttgtatctggtgatctgtgccatggggctctttgtccatgaattcttctacagtctgctgctttttgatttagtgtacagagaagagactttgcttaatgtcattaaaagtgtcactcgcaatggacggtccatcatcctgacagcagttctggctctgatcctcgtttacctgttctcaatagtgggctatcttttcttcaaggatgactttatcttggaagtagataggctgcccaatgaaacagctgttccagaaaccggcgagagtttggcaagcgagttcctgttctccgatgtgtgtagggtggagagtggggagaactgctcctctcctgcacccagagaagagctggtccctgcagaagagacggaacaggataaagagcacacatgtgagacgctgctgatgtgcattgtcaccgtgctgagtcacgggctgcggagcgggggtggagtaggagatgtactcaggaaaccgtccaaagaggaacccctgtttgctgctagagttatttatgacctcttgttcttcttcatggtcatcatcattgttcttaacctgatttttggggttatcattgacacttttgctgacctgaggagtgagaagcagaagaaggaagagatcttgaagaccacgtgctttatctgtggcttggaaagagacaagtttgacaacaagactgtcacctttgaagagcacatcaaggaagaacacaacatgtggcactatctgtgcttcatcgtcctggtgaaagtaaaggactccaccgaatatactgggcctgagagttacgtggcagaaatgatcaaggaaagaaaccttgactggttccccaggatgagagccatgtcattggtcagcagtgattctgaaggagaacagaatgagctgagaaacctgcaggagaagctggagtccaccatgaaacttgtcacgaacctttctggccagctgtcggaattaaaggatcagatgacagaacaaaggaagcagaaacaaagaattggtcttctaggacatcctcctcacatgaatgtcaacccacaacaaccagcataagcaaatgaaagaaaggaattgtatttaccttttataattattattagtgtgggtatggctaatgagttctgattcacccacgaaggttacatttatgctgaatacatttgtaaatactcagttttatactgtatgtatatgattgctactctaaaggtttggatatatgtattgtaattagaattgttggcatgatgacatttcatttgtgccaaaaatattaaaaatgccttttttggaaggactaacagaaagcacctgatttgcacttgaaccagattatagatttaaaagtatatgacatgtattttgtatttaaaactagaatagccagtatttatgttttttataaaactgtgcaatacgaattatgcaatcacaatacatttgtagctcccgagtgtcctaaagggagtgcacttctttgaagctggtgtgttaatactatgtaataaatggttaactttcaaatgatgctgctgccaaaattatattaatagtgagtttcaggcccctgggcattttgtaccatgtaattatcctctggtgatgctgtttctcgttagtggcagtagtgcctccgtctcctagtgataatgctccaagtctatgaactgttaaatcagcattcattttaagaaaagcaactttagtttcaaagatacttttaagcttctaaattgatcatttaaactatttctttaaataagagagccaaattagaggctcatactttagcttgtgaagaagataatgaattttttaaagggaactttctatgcaatgttcaggataaatcgatactgctggccaatcagtgtcatctcctgggtaaattttgatgtcgcattataaagacatgcataattgatggtttctagattatctagtccaaacaatagagtttattttttcttcatctgaaccaacatgctacagtagctaagaagtattaaaactatatacatccatataaagatgaaatatgaactatctcattagaagtcatagttgaccacagacatgttattcttctgaaagagccacattttggttttatttcttgtcacatgatttcttttcttgatggatgaaaaatatgaaatgaaatcttttatatctgttgcctagttttgtacatggatctcattttacaagagaatctctctgcta

SEQ ID NO: 291 - protein, 2695 aa, Homo sapiens
MSDKMSSFLHIGDICSLYAEGSTNGFISTLGLVDDRCVVQPETGDLNNPPKKFRDCLFKLCPMNRYSAQKQFWKAAKPGANSTTDAVLLNKLHHAADLEKKQNETENRKLLGTVIQYGNVIQLLHLKSNKYLTVNKRLPALLEKNAMRVTLDEAGNEGSWFYIQPFYKLRSIGDSVVIGDKVVLNPVNAGQPLHASSHQLVDNPGCNEVNSVNCNTSWKIVLFMKWSDNKDDILKGGDVVRLFHAEQEKFLTCDEHRKKQHVFLRTTGRQSATSATSSKALWEVEVVQHDPCRGGAGYWNSLFRFKHLATGHYLAAEVDPDQDASRSRLRNAQEKMVYSLVSVPEGNDISSIFELDPTTLRGGDSLVPRNSYVRLRHLCTNTWVHSTNIPIDKEEEKPVMLKIGTSPVKEDKEAFAIVPVSPAEVRDLDFANDASKVLGSIAGKLEKGTITQNERRSVTKLLEDLVYFVTGGTNSGQDVLEVVFSKPNRERQKLMREQNILKQIFKLLQAPFTDCGDGPMLRLEELGDQRHAPFRHICRLCYRVLRHSQQDYRKNQEYIAKQFGFMQKQIGYDVLAEDTITALLHNNRKLLEKHITAAEIDTFVSLVRKNREPRFLDYLSDLCVSMNKSIPVTQELICKAVLNPTNADILIETKLVLSRFEFEGVSSTGENALEAGEDEEEVWLFWRDSNKEIRSKSVRELAQDAKEGQKEDRDVLSYYRYQLNLFARMCLDRQYLAINEISGQLDVDLILRCMSDENLPYDLRASFCRLMLHMHVDRDPQEQVTPVKYARLWSEIPSEIAIDDYDSSGASKDEIKERFAQTMEFVEEYLRDVVCQRFPFSDKEKNKLTFEVVNLARNLIYFGFYNFSDLLRLTKILLAILDCVHVTTIFPISKMAKGEENKGSNVMRSIHGVGELMTQVVLRGGGFLPMTPMAAAPEGNVKQAEPEKEDIMVMDTKLKIIEILQFILNVRLDYRISCLLCIFKREFDESNSQTSETSSGNSSQEGPSNVPGALDFEHIEEQAEGIFGGSEENTPLDLDDHGGRTFLRVLLHLTMHDYPPLVSGALQLLFRHFSQRQEVLQAFKQVQLLVTSQDVDNYKQIKQDLDQLRSIVEKSELWVYKGQGPDETMDGASGENEHKKTEEGNNKPQKHESTSSYNYRVVKEILIRLSKLCVQESASVRKSRKQQQRLLRNMGAHAVVLELLQIPYEKAEDTKMQEIMRLAHEFLQNFCAGNQQNQALLHKHINLFLNPGILEAVTMQHIFMNNFQLCSEINERVVQHFVHCIETHGRNVQYIKFLQTIVKAEGKFIKKCQDMVMAELVNSGEDVLVFYNDRASFQTLIQMMRSERDRMDENSPLMYHIHLVELLAVCTEGKNVYTEIKCNSLLPLDDIVRVVTHEDCIPEVKIAYINFLNHCYVDTEVEMKEIYTSNHMWKLFENFLVDICRACNNTSDRKHADSILEKYVTEIVMSIVTTFFSSPFSDQSTTLQTRQPVFVQLLQGVFRVYHCNWLMPSQKASVESCIRVLSDVAKSRAIAIPVDLDSQVNNLFLKSHSIVQKTAMNWRLSARNAARRDSVLAASRDYRNIIERLQDIVSALEDRLRPLVQAELSVLVDVLHRPELLFPENTDARRKCESGGFICKLIKHTKQLLEENEEKLCIKVLQTLREMMTKDRGYGEKGEALRQVLVNRYYGNVRPSGRRESLTSFGNGPLSAGGPGKPGGGGGGSGSSSMSRGEMSLAEVQCHLDKEGASNLVIDLIMNASSDRVFHESILLAIALLEGGNTTIQHSFFCRLTEDKKSEKFFKVFYDRMKVAQQEIKATVTVNTSDLGNKKKDDEVDRDAPSRKKAKEPTTQITEEVRDQLLEASAATRKAFTTFRREADPDDHYQPGEGTQATADKAKDDLEMSAVITIMQPILRFLQLLCENHNRDLQNFLRCQNNKTNYNLVCETLQFLDCICGSTTGGLGLLGLYINEKNVALINQTLESLTEYCQGPCHENQNCIATHESNGIDIITALILNDINPLGKKRMDLVLELKNNASKLLLAIMESRHDSENAERILYNMRPKELVEVIKKAYMQGEVEFEDGENGEDGAASPRNVGHNIYILAHQLARHNKELQSMLKPGGQVDGDEALEFYAKHTAQIEIVRLDRTMEQIVFPVPSICEFLTKESKLRIYYTTERDEQGSKINDFFLRSEDLFNEMNWQKKLRAQPVLYWCARNMSFWSSISFNLAVLMNLLVAFFYPFKGVRGGTLEPHWSGLLWTAMLISLAIVIALPKPHGIRALIASTILRLIFSVGLQPTLFLLGAFNVCNKIIFLMSFVGNCGTFTRGYRAMVLDVEFLYHLLYLVICAMGLFVHEFFYSLLLFDLVYREETLLNVIKSVTRNGRSIILTAVLALILVYLFSIVGYLFFKDDFILEVDRLPNETAVPETGESLASEFLFSDVCRVESGENCSSPAPREELVPAEETEQDKEHTCETLLMCIVTVLSHGLRSGGGVGDVLRKPSKEEPLFAARVIYDLLFFFMVIIIVLNLIFGVIIDTFADLRSEKQKKEEILKTTCFICGLERDKFDNKTVTFEEHIKEEHNMWHYLCFIVLVKVKDSTEYTGPESYVAEMIKERNLDWFPRMRAMSLVSSDSEGEQNELRNLQEKLESTMKLVTNLSGQLSELKDQMTEQRKQKQRIGLLGHPPHMNVNPQQPA

SEQ ID NO: 292 - DNA, 1986 bp, Homo sapiens
agcagccgacgccgagaggcaccgtttcttcttaaaagagaaacgctgcgcgcgcgaggtgggcccctgtcttccagcagctccgggcctgctcgctaggcccgggaggcgcaggcgcaggcgcagtgggggtgagggcgcgtgggggcgcacagcctctggtgcacatggcttcctccccggcggtggacgtgtcctgcaggcggcgggagaagcggcggcagctggacgcgcgccgcagcaagtgccgcatccgcctgggcggccacatggagcagtggtgcctcctcaaggagcggctgggcttctccctgcactcgcagctcgccaagttcctgttggaccggtacacttcttcaggctgtgtcctctgtgcaggtcctgagcctttgcctccaaaaggtctgcagtatctggtgctcttgtctcatgcccacagccgagagtgcagcctggtgcccgggcttcgggggcctggcggccaagatggggggcttgtgtgggagtgctcagcaggccataccttctcctggggaccctctttgagccctacaccttcagaggcacccaagccagcctcccttccacatactactcggagaagttggtgttccgaggccacgagtgggcaggagcttgcagatttggaatctgagcatgatgagaggactcaagaggccaggttgcccaggagggtgggacccccaccagagaccttcccacctccaggagaggaagagggtgaggaagaagaggacaatgatgaggatgaagaggagatgctcagtgatgccagcttatggacctacagctcctccccagatgatagtgagcctgatgcccccagactactgccttcccctgtcacctgcacacctaaagagggggagacaccaccagcccctgcagcactctccagtcctcttgctgtgccggccttgtcagcatcctcattgagttccagagctcctccacctgcagaagtcagggtgcagccacagctcagcaggacccctcaagcggcccagcagactgaggccctggccagcactgggagtcaggcccagtctgctccaaccccggcctgggatgaggacactgcacaaattggccccaagagaattaggaaagctgccaaaagagagctgatgccttgtgacttccctggctgtggaaggatcttctccaaccggcagtatttgaatcaccacaaaaagtaccagcacatccaccagaagtctttctcctgcccagagccagcctgtgggaagtctttcaactttaagaaacacctgaaggagcacatgaagctgcacagtgacacccgggactacatctgtgagttctgcgcccggtctttccgcactagcagcaaccttgtcatccacagacgtatccacactggagaaaaacccctgcagtgtgagatatgcgggtttacctgccgccagaaggcttccctgaactggcaccagcgcaagcatgcagagacggtggctgccttgcgcttcccctgtgaattctgcggcaagcgctttgagaagccagacagtgttgcagcccaccgtagcaaaagtcacccagccctgcttctagcccctcaagagtcacccagtggtcccctagagccctgtcccagcatctctgcccctgggcctctgggatccagcgaggggtccaggccctctgcatctcctcaggctccaaccctgcttcctcagcaatgagctctcctccagctttggctttgggaagccagactccagggactgaaaaggagcaacaaggagagggtctgcttgagaaatgccagatgcttggtccccaggaactaaggcgacagagtgcagggtgggggcaagactgggctgtaggggagctggactactttagtcttcctaaaggacaaaataaacagtattttatgcaggaaaaaaaaaaaaaaaaaaaaaaaaaaaaaaaaaaaaaaaaaaaaaaaaaaaaaaa

SEQ ID NO: 293 - protein, 519 aa, Homo sapiens
MASSPAVDVSCRRREKRRQLDARRSKCRIRLGGHMEQWCLLKERLGFSLHSQLAKFLLDRYTSSGCVLCAGPEPLPPKGLQYLVLLSHAHSRECSLVPGLRGPGGQDGGLVWECSAGHTFSWGPSLSPTPSEAPKPASLPHTTRRSWCSEATSGQELADLESEHDERTQEARLPRRVGPPPETFPPPGEEEGEEEEDNDEDEEEMLSDASLWTYSSSPDDSEPDAPRLLPSPVTCTPKEGETPPAPAALSSPLAVPALSASSLSSRAPPPAEVRVQPQLSRTPQAAQQTEALASTGSQAQSAPTPAWDEDTAQIGPKRIRKAAKRELMPCDFPGCGRIFSNRQYLNHHKKYQHIHQKSFSCPEPACGKSFNFKKHLKEHMKLHSDTRDYICEFCARSFRTSSNLVIHRRIHTGEKPLQCEICGFTCRQKASLNWHQRKHAETVAALRFPCEFCGKRFEKPDSVAAHRSKSHPALLLAPQESPSGPLEPCPSISAPGPLGSSEGSRPSASPQAPTLLPQQ

SEQ ID NO: 294 - DNA, 792 bp, Homo sapiens
  misc_feature (545)..(545): n is a, c, g, or t
  misc_feature (571)..(571): n is a, c, g, or t
  misc_feature (588)..(588): n is a, c, g, or t
  misc_feature (593)..(593): n is a, c, g, or t
  misc_feature (656)..(656): n is a, c, g, or t
gaaaggacaatctgtattttatttgtatctgcctttggcgtgtatacagacacccaggagccccttctcccagcctgggggaggggtggtagattctgaaggaaggagacatcagagtgaggacacaaagttcaacagaaggtcctgctaccctcagcaaggggcatctatgtgggctgggacatgtaccgtctgcccttcctcccatccaggccatctgcgaatctacatgggtcctcctattcgacaccagatcactctttcctctacccacaggcttgctatgagcaagagacacaacctcctctcttctgtgttccagcttcttttcctgttcttcccaccccttaagttctattcctggggatagagacaccaatacccataacctctctcctaagcctccttataacccagggtgcacagcacagactcctgacaactggtaaggccaatgacctgggagctcacagctggctgtgcctgagggcagggcagcaggcatgaatgcttctatgtgtaaggcaggactgcccctatggcanggtgtggggaggccacaggctctggngtatgtctaaaagtggnggcanaaaggtcaggaagccaaaaacatgggcttatttgtcatagaagtcacgtgggctccagacttngactcgtccttttccagtaagcctcagagttcttggctgacacctttgcatccaccagctttccctttggctttcagctctgcagccctttttgcattgcttggttccacggagtctcccggcccacatgctgcat

SEQ ID NO: 295 - protein, 261 aa, Homo sapiens
MEGGLGRAVCLLTGASRGFGRTLAPLLASLLSPGSVLVLSARNDEALRQLEAELGAERSGLRVVRVPADLGAEAGLQQLLGALRELPRPKGLQRLLLINNAGSLGDVSKGFVDLSDSTQVNNYWALNLTSMLCLTSSVLKAFPDSPGLNRTVVNISSLCALQPFKGWALYCAGKAARDMLFQVLALEEPNVRVLNYAPGPLDTDMQQLARETSVDPDMRKGLQELKAKGKLVDCKVSAQKLLSLLEKDEFKSGAHVDFYDK

SEQ ID NO: 296 - DNA, 358 bp, Homo sapiens
cacgaggggggcttctgctgctctggctcccaggtgccagatgtgccatccagttgacccagtctccatcctccctgtctgcatctgtaggagacagagtcaccatcacttgccgggcaagtcagggcattagcagtgctttagcctggtatcagcagaaaccagggaaagctcctaagctcctgatctatgatgcctccagtttgaaaactggggtcccatcaaggttcagcggcagtggatctgggacagatttcactctcaccatcagcagcctgcagcctgaagattttgcaacttattactgtcaacagtttaataattaccctcatggcaccttcggccaagggacacgact

SEQ ID NO: 297 - protein, 125 aa, Homo sapiens
PAQLLGLLLLWLPGARCAIQLTQSPSSLSASVGDRVTITCRASQGISSALAWYQQKPGKAPKLLIYDASSLESGVPSRFSGSGSGTDFTLTISSLQPEDFATYYCQQFNTYPLTFGGGTKVEIKR

SEQ ID NO: 298 - DNA, 3889 bp, Homo sapiens
gagactgagtattctaccttgtaaatactgttatttgtatatactgtaaatgatgacatcggtgggcactaaccgagcccggggaaactgggaacaacctcaaaaccaaaaccagacacagcacaagcagcggccacaggccactgcagaacaaattagacttgcacagatgatttcggaccataatgatgctgactttgaggagaaggtgaaacaattgattgatattacaggcaagaaccaggatgaatgtgtgattgctttgcatgactgcaatggagatgtcaacagagctatcaatgttcttctggaaggaaacccagacacgcattcctgggagatggtcgggaagaagaagggagtctcaggccagaaggatggtggccagacggaatccaatgaggaaggcaaagaaaatcgagaccgggacagagactatagtcggcgacgtggtgggccaccaagacgggggagaggtgccagccgtggacgagagtttcgaggtcaggaaaatggattggatggcaccaagagtggagggccttctggaagaggaacagaaagaggcagaaggggccgtggccgaggcagaggtggctctggtaggcgaggaggaaggttttctgctcaaggaatgggaacctttaacccagctgattatgcagagccagccaatactgatgataactatggcaatagcagcggcaatacgtggaacaacactggccactttgaaccagatgatgggacgagtgcatggaggactgcaacagaggagtgggggactgaagattggaatgaagatctttctgagaccaagatcttcactgcctctaatgtgtcttcagtgcctctgcctgcggagaatgtgacaatcactgctggtcagagaattgaccttgctgttctgctggggaagacaccatctacaatggagaatgattcatctaatctggatccgtctcaggctccttctctggcccagcctctggtgttcagtaattcgaagcagactgccatatcacagcctgcttcagggaacacattttctcatcacagtatggtgagcatgttagggaaaggatttggtgatgtcggtgaagctaaaggcggcagtactacaggctcccagttcttggagcaattcaagactgcccaagccctggctcagttggcagctcagcattctcagtctggaagcaccaccacctcctcttgggacatgggctcgacgacacaatccccatcactggtgcagtatgatttgaagaacccaagtgattcagcagtgcacagcccctttacaaagcgccaggcttttaccccatcttcaaccatgatggaggtgttccttcaggagaagtcacctgcagtggctacctccacagctgcacctccacctccgtcttctcctctgccaagcaaatccacatcggctccacagatgtcgcctggatcttcagacaaccagtcctctagccctcagccggctcaccagaaactgaaacagcagaagaaaaaagcctccttgacttctaagattcctgctctggctgtggagatgcctggctcagcagatatctcagggctaaacctgcagtttggggcattgcagtttgggtcagagcctgtcctttctgattatgagtccacccccaccacgagcgcctcttcaagccaggctccaagtagcctgtataccagcacggccagtgaatcatcctctacaatttcatctaaccagagtcaggagtctggttatcagagcggcccaattcagtcgacaacctatacctcccaaaataatgctcagggccctctttatgaacagagatccacacagactcggcggtaccccagctccatctcttcatcaccccaaaaggacctgactcaggcaaagaatggcttcagttctgtgcaggccacgcagttacagaccacacaatctgttgaaggtgctacaggctctgcagtgaaatctgattcaccttccacttctagcatcccccctctcaatgaaacggtatctgcagcttccttactgacgacaaccaatcagcattcatcctccttgggtggcttgagccacagtgaggagattccaaatactaccaccacacaacacagcagcacgttatctacgcagcagaataccctttcatcatcaacatcttctgggcgcacttcgacatccactcttttgcacacaagtgtggagagtgaggcgaatctccattcttcctccagcactttttccaccacatccagcacagtctctgcacctcccccagtggtcagtgtctcctccagtctcaatagtggcagtagcctgggcctcagcctaggcagcaactccactgtcacagcctcgactcgaagctcagttgctacgacttcaggaaaagctcctcccaacctccctcctggggtcccgccgttgttgcctaatccgtatattatggctccagggctgttacatgcctacccgccacaagtatatggttatgatgacttgcagatgcttcagacaagatttccattggattactacagcatcccatttcccacacccactactccgctgactgggagggatggtagcctggccagcaacccttattctggtgacctcacaaagttcggccgtggggatgcctcctccccagccccggccacaaccttggcccaaccccaacagaaccagacgcagactcaccataccacgcagcagacattcctgaacccggcgctgcctcctggctacagttacaccagcctgccatactatacaggggtcccgggcctccccagcaccttccagtatgggcctgctgtgttccctgtggctcctacctcttccaagcagcatggtgtgaatgtcagtgtgaatgcatcggccacccctttccaacagccgagtggatatgggtctcatggatacaacactggtgtttcagtcacctccagtaacacgggcgtgccagatatctcgggttctgtgtactccaaaacccagcagtcctttgagaaacaaggttttcattccggtactcctgctgcttccttcaacttgccttcagccctaggaagtgggggccccatcaatccggccacagctgctgcctacccacctgccccctttatgcacattctgaccccccatcagcagccgcattctcagatccttcaccatcacctgcagcaggatggccagacgggcagcgggcaacgtagccagaccagctccatcccgcagaagccccagaccaacaagtctgcctacaacagctacagctggggggccaactgaggccctgaccctcttctcccggtcccatcttctgagagggcttctcagcctggaaactatggaaacagcatcaaagagaaaggaatgtggggggtttccgctgccccccacccccagcggcccaccccatgcctcagcttcatgtctgtcccattcctataccatccccaccctgttgtatgtattataggatttgtattttctccttttttttcccccttccattccttctcccctcttgcattcaagattatgaaactttgctatgggccctgcacttcctttgcttcctcctgttcaccctggtggtgtacggatgaggcggggaggtgggacccccaaacatatatcagcccaacagccctaagtctccttctttattattaggaaaacaacaacaacaacaaacaaaaaaatggcgtcatgaatatgaacagcattgtcagatgaattagttgaagtggttttttttttgtttttttttttttttttgtactgtgtcctcaaatttaatggattaatgtgtcttgtatatataaaaagaaaacctctaccttcaaaaaaaaaaaaaaaaaa

SEQ ID NO: 299 - protein, 1087 aa, Homo sapiens
MMTSVGTNRARGNWEQPQNQNQTQHKQRPQATAEQIRLAQMISDHNDADFEEKVKQLIDITGKNQDECVIALHDCNGDVNRAINVLLEGNPDTHSWEMVGKKKGVSGQKDGGQTESNEEGKENRDRDRDYSRRRGGPPRRGRGASRGREFRGQENGLDGTKSGGPSGRGTERGRRGRGRGRGGSGRRGGRFSAQGMGTFNPADYAEPANTDDNYGNSSGNTWNNTGHFEPDDGTSAWRTATEEWGTEDWNEDLSETKIFTASNVSSVPLPAENVTITAGQRIDLAVLLGKTPSTMENDSSNLDPSQAPSLAQPLVFSNSKQTAISQPASGNTFSHHSMVSMLGKGFGDVGEAKGGSTTGSQFLEQFKTAQALAQLAAQHSQSGSTTTSSWDMGSTTQSPSLVQYDLKNPSDSAVHSPFTKRQAFTPSSTMMEVFLQEKSPAVATSTAAPPPPSSPLPSKSTSAPQMSPGSSDNQSSSPQPAHQKLKQQKKKASLTSKIPALAVEMPGSADISGLNLQFGALQFGSEPVLSDYESTPTTSASSSQAPSSLYTSTASESSSTISSNQSQESGYQSGPIQSTTYTSQNNAQGPLYEQRSTQTRRYPSSISSSPQKDLTQAKNGFSSVQATQLQTTQSVEGATGSAVKSDSPSTSSIPPLNETVSAASLLTTTNQHSSSLGGLSHSEEIPNTTTTQHSSTLSTQQNTLSSSTSSGRTSTSTLLHTSVESEANLHSSSSTFSTTSSTVSAPPPVVSVSSSLNSGSSLGLSLGSNSTVTASTRSSVATTSGKAPPNLPPGVPPLLPNPYIMAPGLLHAYPPQVYGYDDLQMLQTRFPLDYYSIPFPTPTTPLTGRDGSLASNPYSGDLTKFGRGDASSPAPATTLAQPQQNQTQTHHTTQQTFLNPALPPGYSYTSLPYYTGVPGLPSTFQYGPAVFPVAPTSSKQHGVNVSVNASATPFQQPSGYGSHGYNTGVSVTSSNTGVPDISGSVYSKTQQSFEKQGFHSGTPAASFNLPSALGSGGPINPATAAAYPPAPFMHILTPHQQPHSQILHHHLQQDGQTGSGQRSQTSSIPQKPQTNKSAYNSYSWGAN

SEQ ID NO: 300 - DNA, 9021 bp, Homo sapiens
cctaaagaaaagtattaagtaaatagcagtacagatggcaaatggattgcacaatatatcctctggatccatagtgaccctgcagagataaacctgtgatggtcaaacaatgtgaaaactgctgtcagagacatgggcagggtgctcttgtttacagagaagaggtgcaaaaatcaacttgatggtagtgggaagatcaggaaatgcttcctgaaattgagtattaagaactaatagacattaggtggttgcagaataagttttgtttaggaaggacaagcagttgggtatgactggcttctaggttgtgtgttgtggagtgactggggataaaagcaggagcaagatcacaaaaggtcttctatgcttatattagggaagttggactttattctcaagctgaagggaagctgttgcatggttttaagcagtaaagtgatatgatcagagttttagaggatgccaagattgaaggcaagtctgaccagttaggagactgcttgttaaattagttcagaggagaaacagtgaaggcagtggcactgggcatgaagaagtatatgtgtgctaattttagatttcttagggaagcagaaatgacaagagttagtggtccattggacagaaatattgaaggagactggggagtctaggttgactcccagggtttaggtttgggcagtaaaatgacatgtagaacaattaactgataaacagcatacagaaagaggaaagaacttcatttcatatgtttgtttttgaggaaaagatgtttgtttttgaacttcctgattcagaggggcttgtgggacatcttggttaagatcctgtagtagttctagtagggtctagaagtcaagagatacaaccccgcctggaaggatttgggagtcttcagcatttggaattttggaagccattgtttactgcagtgcatatgagataatttaaactggtacatagataaacacttgaaaaaattttaatagataggaatttaatgtgtatgagaaacataacttgcacatctaacctttgataatcatggacattatcacttaggccaagtgagctcaataaaagggaaatattaactaaaaatatatgtgatacatggaaatggcaaaaatcacggtgaagctatgcaaacgatgcaagttcagaaagtgctgtgttaagtcatgggtgtggtggataaattcacccaaggagagagtaagagtgagaagaaaagagagttgacattgggtggcggggaatggagaagaagaacccatgaaggaaactgaggaagagcagccagacgaataggaggaaaaccaggagaagatggtctttggagtccaaatgaagagttctgaggaggaagtggtccacagcgtcaaacttgtgcaccatggacaattttgctgagggagatttcactgtggcggattatgccttgttagaagattgccctcacgtggatgattgtgtctttgctgctgaatttatgagcaatgattatgttcgtgtgactcagctttactgtgatggggtgggtgtgcaatataaagattatatccaaagtgagaggaatttggaatttgacatctgcagtatatggtgtagtaaaccaatttctgtcctgcaagattattgcgatgccattaaaataaacatcttctggccacttctgtttcaacatcaaaacagttccgtaatatcacgattgcatccctgtgtggacgccaacaattcacgtgcttctgagataaatttgaagaaactacaacatcttgagttgatggaagatattgtggatttggcaaagaaagttgctaatgattcattccttattggaggcttattgagaattggttgtaaaatagaaaataaaatcttggcaatggaagaagctctgaattggataaaatatgcaggcgatgtaacaattctaactaaattaggatcaattgacaattgttggcctatgttaagtattttctttactgaatacaagtaccacataactaaaattgtaatggaagactgcaatttgcttgaagaacttaaaactcaaagttgtatggattgtatagaggaaggagaactaatgaaaatgaaaggaaatgaagagttttccaaagaaagatttgatatagctattatctattacaccagagccattgaatatagacctgaaaactaccttctttatggtaaccgagctctttgttttcttcgtactggacagtttagaaatgcactcggtgatggaaagagagccactattctgaagaacacttggccaaagggtcattatcgttattgtgatgctctttctatgctgggggaatatgactgggccctgcaagcaaacataaaagctcaaaaactctgtaaaaatgaccctgagggaatcaaggatctaattcagcagcatgtaaagttacaaaaacaaatagaagacctacaaggtcgaacagcaaataaggatccaattaaagccttttatgaaaacagggcctacacacctaggagtttatcagcacctatatttactacttcacttaactttgtggagaaggaaagagatttcagaaaaattaatcacgaaatggccaacggtggtaatcagaatctaaaggtggcggatgaggcgttgaaggtagatgattgtgactgtcatcctgaattttcaccaccatcaagtcagcctccaaaacataaaggaaaacaaaaatctcgaaacaatgaatcagaaaagttcagttctagttcaccattgactttaccagcagatttgaagaacatcttggagaaacagttttctaaatcttccagagctgcacaccaggattttgctaatataatgaaaatgctgagaagcttaattcaagatggctatatggccttattggagcagcgttgccgcagcgctgcacaggcctttacagagttgctgaacggtttagatcctcaaaaaataaagcaattgaacctggccatgattaactatgttttggtcgtctatggacttgccatttctctccttggaataggacagcctgaggaattatctgaagccgaaaaccagtttaagaggattattgaacactaccccagtgagggccttgattgcttggcctactgtggaattggaaaagtatatttgaaaaaaaacagatttctagaagctctcaatcactttgagaaagcaagaaccttgatttatcgtcttcctggagtgttaacttggcccacgagtaatgtgattattgaagagtctcagccacaaaaaataaagatgctgttagagaaatttgttgaagaatgcaagttccctccagtgccagatgccatttgttgctatcagaagtgccatggatattctaagatccagatatacataactgatccagactttaagggttttatacgcatcagctgttgccagtactgtaaaatagaatttcacatgaattgctggaagaagttaaaaactacaacctttaatgataaaattgacaaggattttctacaaggaatatgtcttacccctgactgtgaaggtgtcatttctaagattatcatcttcagcagtggtggtgaagttaaatgtgaatttgaacacaaggtcataaaagaaaaggttcctccaagacctattctgaaacagaaatgttctagcctagagaaactaagactgaaagaagacaaaaaattgaagagaaagatccaaaaaaaagaagcaaaaaagttagcacaagaaagaatggaggaggacttaagagaaagtaatccacccaaaaatgaagagcagaaagaaactgtagacaatgttcagcgttgtcagttccttgatgacagaattctacagtgtataaagcagtatgctgacaagattaaatccggcatacagaatacagccatgcttctcaaagaattgctttcttggaaagttttgagcacagaagactatacaacctgtttttctagcagaaattttctaaatgaagcagtggactatgttattcgccacttgattcaagaaaataacagagtaaagacaagaatatttctgcatgttttgagtgagcttaaagaagtggagcccaaattagccgcctggatccaaaaacttaatagctttggcttagatgccacaggaactttcttttctcgttatggagcatctcttaaactgcttgattttagtatcatgactttcctctggaatgagaaatatggtcacaaactagactctatagaaggaaagcaacttgattatttctctgagccagcatcattgaaggaagcccgttgtttaatatggctgctagaagaacacagagacaagttcccagcattgcatagtgctttagatgaattctttgatataatggacagccgctgtactgtgttaaggaaacaagatagtggtgaagcaccgtttagttcaaccaaggtgaaaaacaaaagcaagaaaaagaagccaaaggattcaaagcctatgttagttgggtctggaacaacttcagtaacttcaaataatgagatcatcacttcaagtgaagaccatagcaatcgaaattcagattctgcaggcccatttgcagtgcctgaccatcttcggcaagatgtagaagaattcgaagctctctatgaccaacacagtaacgaatatgttgtccgcaataagaagctatgggacatgaacccaaaacaaaaatgttcaactctatatgattacttctctcagtttttggaggaacatggtcccttggacatgagtaacaagatgttctctgcagaatatgagtttttcccagaagaaactcgacagatactagaaaaagcaggaggtttaaaaccttttctcttgggatgccctcgttttgttgtgattgacaactgtattgcactgaagaaggttgcatcacggctcaagaaaaaaaggaagaagaaaaacattaaaacaaaagtagaagaaatttcaaaagcaggggagtatgtacgagttaaactacaactgaatccagctgctagggaatttaaaccagatgtaaagtctaaaccagtgtcagattcatcttcagcaccagcttttgaaaatgtgaaacccaaacctgtgtctgcaaattctcccaagccagcttgtgaagatgtgaaggccaaaccagtatccgacaattcttctagacaagtttctgaggatgggcaacccaaaggggtctcttctaattctcctaaaccaggctctgaggatgcaaattacaagcgagtctcctgtaattcccccaaaccggttcttgaggatgtgaaaccaacttattgggctcaatcccatttggtcacaggatactgtacgtatcttcctttccagagatttgatatcacccagacaccgccagcatacataaacgtgttaccaggtttgccccagtacaccagcatatatacacccttggccagcctttctcctgaatatcagctaccaagatcagtaccagtggtgccgtcttttgtagccaatgacagagcagataaaaatgctgctgcctattttgagggtcatcatttgaatgctgagaatgttgctggtcaccagattgcctctgaaacacagatccttgagggctctttgggaatatctgtaaagtcacactgcagcacaggtgatgctcatacagtcctgagtgagtctaacagaaatgatgagcactgtggaaattctaacaacaaatgtgaagtaattccagaaagcaccagtgcagtaacaaacattccacacgtgcagatggttgccatacaggtatcttggaacataatacaccaagaagtcaatactgagccatataatccttttgaggaacgacaaggggaaatttcacggattgaaaaggagcaccaagtattacaagaccaacttcaagaagtgtatgaaaattatgagcagataaaacttaagggcttagaagagaccagggacctggaagagaagttgaaaaggcacttagaagaaaacaagatctcaaagacggaattagattggttccttcaagatttggaaagagaaattaaaaaatggcaacaggaaaaaaaagaaatccaagaaagactaaaatcactgaagaagaaaattaaaaaggtttcaaatgccagtgaaatgtatacccagaaaaatgatggaaaggaaaaggaacatgaattacatctggatcagtcccttgaaatcagcaacacacttacaaatgagaaaatgaaaatagaagagtatataaagaaagggaaagaggattatgaagagagtcatcagagagctgtggctgcagaggtatccgtacttgaaaactggaaggagagtgaagtgtataagctacagatcatggagtcacaagcagaagcctttctgaagaagctggggctgattagccgtgatcctgcagcatatcctgacatggagtctgatatacgttcatgggaattgtttctttctaatgttacaaaagaaattgagaaagcaaagtctcagtttgaagaacaaattaaggcaattaaaaatggttctcggctcagtgaactttctaaagtgcagatttctgagctttcatttcctgcctgtaacacggttcatcccgagttactccctgagtcttcaggcgacgatggccaagggcttgtgacttctgcaagcgacgtgactggaaaccacgcagcacttcacagggatcctagtgtgttctctgctggtgattccccaggggaggctccttctgcgctgttgccagggccaccccctggtcagcctgaagccactcagctgacagggccaaaacgggctggccaggcagctctgtcagaacgaagccctgtggctgatcggaagcagcctgttcctccaggacgtgctgcgcgttcaagccagtctccaaaaaagccgttcaatagtattattgagcacctgtcagtggtattcccatgttacaacagcactgagcttgctggttttattaaaaaagtgcgaagcaaaaacaagaactcactctcaggattgagtattgatgaaattgtccaaagagtgacagaacacattctagatgaacagaaaaagaaaaagccaaacccaggaaaggacaagaggacttatgagcccagctctgccacccccgtgaccaggtcctcccagggctcaccctcggtggttgttgcaccatcacccaaaaccaaggggcagaaagcagaagatgtccctgtgaggattgcactgggtgcaagttcctgtgaaatatgccacgaggtgttcaaatcaaaaaacgtgcgtgtgctcaaatgtgggcacaagtatcacaaagggtgctttaagcagtggcttaaagggcagagcgcttgcccggcctgccagggtcgtgatctcctgacagaagagtcaccttctggaagaggctggcccagtcagaatcaggagctgccttcctgctcttctaggtagtcacacttcactaaagtgtcatccaccagtgtgttgaatccgaagaatgacaattttctaccactggtgtaaaaaacaaacatttgaagacccttgtgcattgtgtgtcacaaagctaaatacatggaaatcgttaatatcgctgatattaagtaatttccccactctgagtgaatactttgatgattgccaacagtggctaataaaatgacggctaccacactcatgggtcactggggctgcgcagggctctttgaggtgggtggcttcttttggaaagtactatgaacgtctcgaagcagtattctagtgataagaattcttaacatagccaagcgccccacgtttgttccccacgtttgttccccttttctgtttgaaaaacctgttctggtagctccacaagagagatgatactgactttttaaattttttacaagagtctgtattcctgatatgcctatatttttcctcaaagattctgcattttaaggatgggcataagcaaactatattttaataatttatagttaatgttaaaatattggctgatttagaccaaaagattcaaatctcctctttgtgaaatcccatctgcatttgattttttattattttatgttcccccgttagattgttttaagtgtttgcttttcatcttttatagatgtaatctgattttcaaaaatcattaacactttttaattagtatcgactaagactttttccccctggaatcgaggctgtgtgtccgtcatcccagcccccggttggagcctgctctttgaactccgctgccttccttagcagcttctgtcctcttctgtgagtcagtcagcgagtgcttgggatccgcatccagccgtgctgagcacacaacaggctgtgtgtggaaatggccaccaccattctccttccccaccccaccacaaaaagagaagctgtgtctttagacaaccctgaggtatctgtgttacaatcgttctgtgtttgatatttgtgtaaagtatgcatgcagtcttgtactgtgacctaagaacaaaactgtaactgcattagaaaccatgaaaaaattagatattgttttgtgacttttagacagtggtaaatatagaaccatgaattctggtcacattccatttctctccaacatgaaggatcaaaaaatgtttttcaatgtgttctttgttccactggaaacttagagtcatgagtttatgagctgatttggtcaccttcctctgcctttgttcactgtgagttctgatgtcttagtgacttagttcttagaagctcacgccttagtttgaaacagattctccacggtggtccccaaaacactgtctgcatatccataagaattgagcgctatgggtgttaacgtgcatgaggatcagtttgcagcagcaagtacaaaaggagaagaggaacatccgttgaatgagtgtgttttgtacataacttcagatacttgtgaacatgccttatatttgtccaacaactgtcagaataaagaacattctaaaatgagaaaaaaaaaaaaaaaa

SEQ ID NO: 301 - protein, 2025 aa, Homo sapiens
MDNFAEGDFTVADYALLEDCPHVDDCVFAAEFMSNDYVRVTQLYCDGVGVQYKDYIQSERNLEFDICSIWCSKPISVLQDYCDAIKINIFWPLLFQHQNSSVISRLHPCVDANNSRASEINLKKLQHLELMEDIVDLAKKVANDSFLIGGLLRIGCKIENKILAMEEALNWIKYAGDVTILTKLGSIDNCWPMLSIFFTEYKYHITKIVMEDCNLLEELKTQSCMDCIEEGELMKMKGNEEFSKERFDIAIIYYTRAIEYRPENYLLYGNRALCFLRTGQFRNALGDGKRATILKNTWPKGHYRYCDALSMLGEYDWALQANIKAQKLCKNDPEGIKDLIQQHVKLQKQIEDLQGRTANKDPIKAFYENRAYTPRSLSAPIFTTSLNFVEKERDFRKINHEMANGGNQNLKVADEALKVDDCDCHPEFSPPSSQPPKHKGKQKSRNNESEKFSSSSPLTLPADLKNILEKQFSKSSRAAHQDFANIMKMLRSLIQDGYMALLEQRCRSAAQAFTELLNGLDPQKIKQLNLAMINYVLVVYGLAISLLGIGQPEELSEAENQFKRIIEHYPSEGLDCLAYCGIGKVYLKKNRFLEALNHFEKARTLIYRLPGVLTWPTSNVIIEESQPQKIKMLLEKFVEECKFPPVPDAICCYQKCHGYSKIQIYITDPDFKGFIRISCCQYCKIEFHMNCWKKLKTTTFNDKIDKDFLQGICLTPDCEGVISKIIIFSSGGEVKCEFEHKVIKEKVPPRPILKQKCSSLEKLRLKEDKKLKRKIQKKEAKKLAQERMEEDLRESNPPKNEEQKETVDNVQRCQFLDDRILQCIKQYADKIKSGIQNTAMLLKELLSWKVLSTEDYTTCFSSRNFLNEAVDYVIRHLIQENNRVKTRIFLHVLSELKEVEPKLAAWIQKLNSFGLDATGTFFSRYGASLKLLDFSIMTFLWNEKYGHKLDSIEGKQLDYFSEPASLKEARCLIWLLEEHRDKFPALHSALDEFFDIMDSRCTVLRKQDSGEAPFSSTKVKNKSKKKKPKDSKPMLVGSGTTSVTSNNEIITSSEDHSNRNSDSAGPFAVPDHLRQDVEEFEALYDQHSNEYVVRNKKLWDMNPKQKCSTLYDYFSQFLEEHGPLDMSNKMFSAEYEFFPEETRQILEKAGGLKPFLLGCPRFVVIDNCIALKKVASRLKKKRKKKNIKTKVEEISKAGEYVRVKLQLNPAAREFKPDVKSKPVSDSSSAPAFENVKPKPVSANSPKPACEDVKAKPVSDNSSRQVSEDGQPKGVSSNSPKPGSEDANYKRVSCNSPKPVLEDVKPTYWAQSHLVTGYCTYLPFQRFDITQTPPAYINVLPGLPQYTSIYTPLASLSPEYQLPRSVPVVPSFVANDRADKNAAAYFEGHHLNAENVAGHQIASETQILEGSLGISVKSHCSTGDAHTVLSESNRNDEHCGNSNNKCEVIPESTSAVTNIPHVQMVAIQVSWNIIHQEVNTEPYNPFEERQGEISRIEKEHQVLQDQLQEVYENYEQIKLKGLEETRDLEEKLKRHLEENKISKTELDWFLQDLEREIKKWQQEKKEIQERLKSLKKKIKKVSNASEMYTQKNDGKEKEHELHLDQSLEISNTLTNEKMKIEEYIKKGKEDYEESHQRAVAAEVSVLENWKESEVYKLQIMESQAEAFLKKLGLISRDPAAYPDMESDIRSWELFLSNVTKEIEKAKSQFEEQIKAIKNGSRLSELSKVQISELSFPACNTVHPELLPESSGDDGQGLVTSASDVTGNHAALHRDPSVFSAGDSPGEAPSALLPGPPPGQPEATQLTGPKRAGQAALSERSPVADRKQPVPPGRAARSSQSPKKPFNSIIEHLSVVFPCYNSTELAGFIKKVRSKNKNSLSGLSIDEIVQRVTEHILDEQKKKKPNPGKDKRTYEPSSATPVTRSSQGSPSVVVAPSPKTKGQKAEDVPVRIALGASSCEICHEVFKSKNVRVLKCGHKYHKGCFKQWLKGQSACPACQGRDLLTEESPSGRGWPSQNQELPSCSSR

SEQ ID NO: 302 - DNA, 721 bp, Homo sapiens
cactacgtaaagtttatttttatatatatatataaaaaaaagtataacactggagcctaaaaccattctcttttgtagaatacatattggcgttgaaacagtttaaagaaatgaaatggctatctacaaaaagttagttttgattgctgtcttcccccatactttgtgtcttcacacataaagaaaattttcaaagattttatattcagcaattttttaaaaagtacactgttttccactgctatggtctttataaaggacttgacttaaaatttcaaataaaaaagaattaaggttctaggataactcttgtgtcttttaagagcatctttatacagaacaatttggaccggcatgcaggcaacttcttttgttgttacatacctgtattaggaaaattacacccattttacagaaaaatcccaaaacatatactgcaataagctcaaaacaatgtgaaaaagaccagtgtgaatggcacacaaaaatcgcctctttataaattaactggaattcatgatcatgaagtaggcacagggaaatccagtcctcagggctttgctctctggaagaacacctttaagtaatttttaaaaactttagcatcaggctgctggagcgcttgacaaaactcctgaattattcttgagctacttgccaagagggcaggtattcttgttgagatactgaacaattcttggccccggttgaaatgaattgt

SEQ ID NO: 303 - protein, 962 aa, Homo sapiens
MDEQALLGLNPNADSDFRQRALAYFEQLKISPDAWQVCAEALAQRTYSDDHVKFFCFQVLEHQVKYKYSELTTVQQQLIRETLISWLQAQMLNPQPEKTFIRNKAAQVFALLFVTEYLTKWPKFFFDILSVVDLNPRGVDLYLRILMAIDSELVDRDVVHTSEEARRNTLIKDTMREQCIPNLVESWYQILQNYQFTNSEVTCQCLEVVGAYVSWIDLSLIANDRFINMLLGHMSIEVLREEACDCLFEVVNKGMDPVDKMKLVESLCQVLQSAGFFSIDQEEDVDFLARFSKLVNGMGQSLIVSWSKLIKNGDIKNAQEALQAIETKVALMLQLLIHEDDDISSNIIGFCYDYLHILKQLTVLSDQQKANVEAIMLAVMKKLTYDEEYNFENEGEDEAMFVEYRKQLKLLLDRLAQVSPELLLASVRRVFSSTLQNWQTTRFMEVEVAIRLLYMLAEALPVSHGAHFSGDVSKASALQDMMRTLVTSGVSSYQHTSVTLEFFETVVRYEKFFTVEPQHIPCVLMAFLDHRGLRHSSAKVRSRTAYLFSRFVKSLNKQMNPFIEDILNRIQDLLELSPPENGHQSLLSSDDQLFIYETAGVLIVNSEYPAERKQALMRNLLTPLMEKFKILLEKLMLAQDEERQASLADCLNHAVGFASRTSKAFSNKQTVKQCGCSEVYLDCLQTFLPALSCPLQKDILRSGVRTFLHRMIICLEEEVLPFIPSASEHMLKDCEAKDLQEFIPLINQITAKFKIQVSPFLQQMFMPLLHAIFEVLLRPAEENDQSAALEKQMLRRSYFAFLQTVTGSGMSEVIANQGAENVERVLVTVIQGAVEYPDPIAQKTCFIILSKLVELWGGKDGPVGFADFVYKHIVPACFLAPLKQTFDLADAQTVLALSECAVTLKTIHLKRGPECVQYLQQEYLPSLQVAPEIIQEFCQALQQPDAKVFKNYLKVFFQRAKP

SEQ ID NO: 304 - DNA, 1767 bp, Homo sapiens
cagcggcggtggcccaggtagaggggtccgcgctggcggcggcggcggcgctgttccccgcgcggtccgcggagcggggtccgggctgcgcgacgtggggcggcggcggcactgcggccccggcccaagcccgaccccgggtcccctcctcggccgccccccgcccggccgcccgccctcgggcctccccccgggccctcggtcccctcccccgctggcggggcccggacagaagatggtgcagaagaaaccagccgaacttcagggtttccaccgttcgttcaaggggcagaaccccttcgagctggccttctccctagaccagcccgaccacggagactctgactttggcctgcagtgctcagcccgccctgacatgcccgccagccagcccattgacatcccggacgccaagaagaggggcaagaagaagaagcgcggccgggccaccgacagcttctcgggcaggtttgaagacgtctaccagctgcaggaagatgtgctgggggagggcgctcatgcccgagtgcagacctgcatcaacctgatcaccagccaggagtacgccgtcaagatcattgagaagcagccaggccacattcggagcagggttttcagggaggtggagatgctgtaccagtgccagggacacaggaacgtcctagagctgattgagttcttcgaggaggaggaccgcttctacctggtgtttgagaagatgcggggaggctccatcctgagccacatccacaagcgccggcacttcaacgagctggaggccagcgtggtggtgcaggacgtggccagcgccttggactttctgcataacaaaggcatcgcccacagggacctaaagccggaaaacatcctctgtgagcaccccaaccaggtctcccccgtgaagatctgtgacttcgacctgggcagcggcatcaaactcaacggggactgctcccctatctccaccccggagctgctcactccgtgcggctcggcggagtacatggccccggaggtagtggaggccttcagcgaggaggctagcatctacgacaagcgctgcgacctgtggagcctgggcgtcatcttgtatatcctactcagcggctacccgcccttcgtgggccgctgtggcagcgactgcggctgggaccgcggcgaggcctgccctgcctgccagaacatgctgtttgagagcatccaggagggcaagtacgagttccccgacaaggactgggcccacatctcctgcgctgccaaagacctcatctccaagctgctggtccgtgacgccaagcagaggctgagtgccgcccaagtcctgcagcacccctgggttcaggggtgcgccccggagaacaccttgcccactcccatggtcctgcagaggtgggacagtcacttcctcctccctccccacccctgtcgcatccacgtgcgacctggaggactggtcagaaccgttactgtgaatgagtgaagatcctggaggaccctgggccccaggccagctcccatcgctgggggacggtgaacggccatgtgttaatgttacgatgtttttaaaagacaaaaaaaaaaaaaaaacctcaaaagtttttttaaagtgggggaaaaacatccaagcactttaattccaatgtaccaggtgaactgacggagctcagaagttttcctttacaccaactgtcaatgccggaattttgtattctgttttgtaaagatttaataaaagtcaaaaaacttgcaaaaaaaaaaaaaaaaaaa

SEQ ID NO: 305 - protein, 414 aa, Homo sapiens
MVQKKPAELQGFHRSFKGQNPFELAFSLDQPDHGDSDFGLQCSARPDMPASQPIDIPDAKKRGKKKKRGRATDSFSGRFEDVYQLQEDVLGEGAHARVQTCINLITSQEYAVKIIEKQPGHIRSRVFREVEMLYQCQGHRNVLELIEFFEEEDRFYLVFEKMRGGSILSHIHKRRHFNELEASVVVQDVASALDFLHNKGIAHRDLKPENILCEHPNQVSPVKICDFDLGSGIKLNGDCSPISTPELLTPCGSAEYMAPEVVEAFSEEASIYDKRCDLWSLGVILYILLSGYPPFVGRCGSDCGWDRGEACPACQNMLFESIQEGKYEFPDKDWAHISCAAKDLISKLLVRDAKQRLSAAQVLQHPWVQGCAPENTLPTPMVLQRWDSHFLLPPHPCRIHVRPGGLVRTVTVNE

SEQ ID NO: 306 - DNA, 2755 bp, Homo sapiens
cctacccgcgcgcaggccaagttgctgaatcaatggagccctccccaacccgggcgttccccagcgaggcttccttcccatcctcctgaccaccggggcttttcgtgagctcgtctctgatctcgcgcaagagtgacacacaggtgttcaaagacgcttctggggagtgagggaagcggtttacgagtgacttggctggagcctcaggggcgggcactggcacggaacacaccctgaggccagccctggctgcccaggcggagctgcctcttctcccgcgggttggtggacccgctcagtacggagttggggaagctctttcacttcggaggattgctcaacaaccatgctgggcatctggaccctcctacctctggttcttacgtctgttgctagattatcgtccaaaagtgttaatgcccaagtgactgacatcaactccaagggattggaattgaggaagactgttactacagttgagactcagaacttggaaggcctgcatcatgatggccaattctgccataagccctgtcctccaggtgaaaggaaagctagggactgcacagtcaatggggatgaaccagactgcgtgccctgccaagaagggaaggagtacacagacaaagcccatttttcttccaaatgcagaagatgtagattgtgtgatgaaggacatggcttagaagtggaaataaactgcacccggacccagaataccaagtgcagatgtaaaccaaactttttttgtaactctactgtatgtgaacactgtgacccttgcaccaaatgtgaacatggaatcatcaaggaatgcacactcaccagcaacaccaagtgcaaagaggaaggatccagatctaacttggggtggctttgtcttcttcttttgccaattccactaattgtttgggtgaagagaaaggaagtacagaaaacatgcagaaagcacagaaaggaaaaccaaggttctcatgaatctccaaccttaaatcctgaaacagtggcaataaatttatctgatgttgacttgagtaaatatatcaccactattgctggagtcatgacactaagtcaagttaaaggctttgttcgaaagaatggtgtcaatgaagccaaaatagatgagatcaagaatgacaatgtccaagacacagcagaacagaaagttcaactgcttcgtaattggcatcaacttcatggaaagaaagaagcgtatgacacattgattaaagatctcaaaaaagccaatctttgtactcttgcagagaaaattcagactatcatcctcaaggacattactagtgactcagaaaattcaaacttcagaaatgaaatccaaagcttggtctagagtgaaaaacaacaaattcagttctgagtatatgcaattagtgtttgaaaagattcttaatagctggctgtaaatactgcttggttttttactgggtacattttatcatttattagcgctgaagagccaacatatttgtagatttttaatatctcatgattctgcctccaaggatgtttaaaatctagttgggaaaacaaacttcatcaagagtaaatgcagtggcatgctaagtacccaaataggagtgtatgcagaggatgaaagattaagattatgctctggcatctaacatatgattctgtagtatgaatgtaatcagtgtatgttagtacaaatgtctatccacaggctaaccccactctatgaatcaatagaagaagctatgaccttttgctgaaatatcagttactgaacaggcaggccactttgcctctaaattacctctgataattctagagattttaccatatttctaaactttgtttataactctgagaagatcatatttatgtaaagtatatgtatttgagtgcagaatttaaataaggctctacctcaaagacctttgcacagtttattggtgtcatattatacaatatttcaattgtgaattcacatagaaaacattaaattataatgtttgactattatatatgtgtatgcattttactggctcaaaactacctacttctttctcaggcatcaaaagcattttgagcaggagagtattactagagctttgccacctctccatttttgccttggtgctcatcttaatggcctaatgcacccccaaacatggaaatatcaccaaaaaatacttaatagtccaccaaaaggcaagactgcccttagaaattctagcctggtttggagatactaactgctctcagagaaagtagctttgtgacatgtcatgaacccatgtttgcaatcaaagatgataaaatagattcttatttttcccccacccccgaaaatgttcaataatgtcccatgtaaaacctgctacaaatggcagcttatacatagcaatggtaaaatcatcatctggatttaggaattgctcttgtcatacccccaagtttctaagatttaagattctccttactactatcctacgtttaaatatctttgaaagtttgtattaaatgtgaattttaagaaataatatttatatttctgtaaatgtaaactgtgaagatagttataaactgaagcagatacctggaaccacctaaagaacttccatttatggaggatttttttgccccttgtgtttggaattataaaatataggtaaaagtacgtaattaaataatgtttttggtaaaaaaaaaaaaaaaaaaaaaaaaaaaaaaaaaaaaaaaaaaaaaaaaaaaaaaaaaaaaaaaaaaa

SEQ ID NO: 307 - protein, 335 aa, Homo sapiens
MLGIWTLLPLVLTSVARLSSKSVNAQVTDINSKGLELRKTVTTVETQNLEGLHHDGQFCHKPCPPGERKARDCTVNGDEPDCVPCQEGKEYTDKAHFSSKCRRCRLCDEGHGLEVEINCTRTQNTKCRCKPNFFCNSTVCEHCDPCTKCEHGIIKECTLTSNTKCKEEGSRSNLGWLCLLLLPIPLIVWVKRKEVQKTCRKHRKENQGSHESPTLNPETVAINLSDVDLSKYITTIAGVMTLSQVKGFVRKNGVNEAKIDEIKNDNVQDTAEQKVQLLRNWHQLHGKKEAYDTLIKDLKKANLCTLAEKIQTIILKDITSDSENSNFRNEIQSLV

SEQ ID NO: 308 - DNA, 5411 bp, Homo sapiens
gtgtcccatagtgtttccaaacttggaaagggcgggggagggcgggaggatgcggagggcggaggtatgcagacaacgagtcagagtttccccttgaaagcctcaaaagtgtccacgtcctcaaaaagaatggaaccaatttaagaagccagccccgtggccacgtcccttcccccattcgctccctcctctgcgcccccgcaggctcctcccagctgtggctgcccgggcccccagccccagccctcccattggtggaggcccttttggaggcaccctagggccagggaaacttttgccgtataaatagggcagatccgggctttattattttagcaccacggcagcaggaggtttcggctaagttggaggtactggccacgactgcatgcccgcgcccgccaggtgatacctccgccggtgacccaggggctctgcgacacaaggagtctgcatgtctaagtgctagacatgctcagctttgtggatacgcggactttgttgctgcttgcagtaaccttatgcctagcaacatgccaatctttacaagaggaaactgtaagaaagggcccagccggagatagaggaccacgtggagaaaggggtccaccaggccccccaggcagagatggtgaagatggtcccacaggccctcctggtccacctggtcctcctggcccccctggtctcggtgggaactttgctgctcagtatgatggaaaaggagttggacttggccctggaccaatgggcttaatgggacctagaggcccacctggtgcagctggagccccaggccctcaaggtttccaaggacctgctggtgagcctggtgaacctggtcaaactggtcctgcaggtgctcgtggtccagctggccctcctggcaaggctggtgaagatggtcaccctggaaaacccggacgacctggtgagagaggagttgttggaccacagggtgctcgtggtttccctggaactcctggacttcctggcttcaaaggcattaggggacacaatggtctggatggattgaagggacagcccggtgctcctggtgtgaagggtgaacctggtgcccctggtgaaaatggaactccaggtcaaacaggagcccgtgggcttcctggtgagagaggacgtgttggtgcccctggcccagctggtgcccgtggcagtgatggaagtgtgggtcccgtgggtcctgctggtcccattgggtctgctggccctccaggcttcccaggtgcccctggccccaagggtgaaattggagctgttggtaacgctggtcctgctggtcccgccggtccccgtggtgaagtgggtcttccaggcctctccggccccgttggacctcctggtaatcctggagcaaacggccttactggtgccaagggtgctgctggccttcccggcgttgctggggctcccggcctccctggaccccgcggtattcctggccctgttggtgctgccggtgctactggtgccagaggacttgttggtgagcctggtccagctggctccaaaggagagagcggtaacaagggtgagcccggctctgctgggccccaaggtcctcctggtcccagtggtgaagaaggaaagagaggccctaatggggaagctggatctgccggccctccaggacctcctgggctgagaggtagtcctggttctcgtggtcttcctggagctgatggcagagctggcgtcatgggccctcctggtagtcgtggtgcaagtggccctgctggagtccgaggacctaatggagatgctggtcgccctggggagcctggtctcatgggacccagaggtcttcctggttcccctggaaatatcggccccgctggaaaagaaggtcctgtcggcctccctggcatcgacggcaggcctggcccaattggcccagctggagcaagaggagagcctggcaacattggattccctggacccaaaggccccactggtgatcctggcaaaaacggtgataaaggtcatgctggtcttgctggtgctcggggtgctccaggtcctgatggaaacaatggtgctcagggacctcctggaccacagggtgttcaaggtggaaaaggtgaacagggtccccctggtcctccaggcttccagggtctgcctggcccctcaggtcccgctggtgaagttggcaaaccaggagaaaggggtctccatggtgagtttggtctccctggtcctgctggtccaagaggggaacgcggtcccccaggtgagagtggtgctgccggtcctactggtcctattggaagccgaggtccttctggacccccagggcctgatggaaacaagggtgaacctggtgtggttggtgctgtgggcactgctggtccatctggtcctagtggactcccaggagagaggggtgctgctggcatacctggaggcaagggagaaaagggtgaacctggtctcagaggtgaaattggtaaccctggcagagatggtgctcgtggtgctcctggtgctgtaggtgcccctggtcctgctggagccacaggtgaccggggcgaagctggggctgctggtcctgctggtcctgctggtcctcggggaagccctggtgaacgtggtgaggtcggtcctgctggccccaatggatttgctggtcctgctggtgctgctggtcaacctggtgctaaaggagaaagaggagccaaagggcctaagggtgaaaacggtgttgttggtcccacaggccccgttggagctgctggcccagctggtccaaatggtccccccggtcctgctggaagtcgtggtgatggaggcccccctggtatgactggtttccctggtgctgctggacggactggtcccccaggaccctctggtatttctggccctcctggtccccctggtcctgctgggaaagaagggcttcgtggtcctcgtggtgaccaaggtccagttggccgaactggagaagtaggtgcagttggtccccctggcttcgctggtgagaagggtccctctggagaggctggtactgctggacctcctggcactccaggtcctcagggtcttcttggtgctcctggtattctgggtctccctggctcgagaggtgaacgtggtctaccaggtgttgctggtgctgtgggtgaacctggtcctcttggcattgccggccctcctggggcccgtggtcctcctggtgctgtgggtagtcctggagtcaacggtgctcctggtgaagctggtcgtgatggcaaccctgggaacgatggtcccccaggtcgcgatggtcaacccggacacaagggagagcgcggttaccctggcaatattggtcccgttggtgctgcaggtgcacctggtcctcatggccccgtgggtcctgctggcaaacatggaaaccgtggtgaaactggtccttctggtcctgttggtcctgctggtgctgttggcccaagaggtcctagtggcccacaaggcattcgtggcgataagggagagcccggtgaaaaggggcccagaggtcttcctggcttaaagggacacaatggattgcaaggtctgcctggtatcgctggtcaccatggtgatcaaggtgctcctggctccgtgggtcctgctggtcctaggggccctgctggtccttctggccctgctggaaaagatggtcgcactggacatcctggtacagttggacctgctggcattcgaggccctcagggtcaccaaggccctgctggcccccctggtccccctggccctcctggacctccaggtgtaagcggtggtggttatgactttggttacgatggagacttctacagggctgaccagcctcgctcagcaccttctctcagacccaaggactatgaagttgatgctactctgaagtctctcaacaaccagattgagacccttcttactcctgaaggctctagaaagaacccagctcgcacatgccgtgacttgagactcagccacccagagtggagcagtggttactactggattgaccctaaccaaggatgcactatggatgctatcaaagtatactgtgatttctctactggcgaaacctgtatccgggcccaacctgaaaacatcccagccaagaactggtataggagctccaaggacaagaaacacgtctggctaggagaaactatcaatgctggcagccagtttgaatataatgtagaaggagtgacttccaaggaaatggctacccaacttgccttcatgcgcctgctggccaactatgcctctcagaacatcacctaccactgcaagaacagcattgcatacatggatgaggagactggcaacctgaaaaaggctgtcattctacagggctctaatgatgttgaacttgttgctgagggcaacagcaggttcacttacactgttcttgtagatggctgctctaaaaagacaaatgaatggggaaagacaatcattgaatacaaaacaaataagccatcacgcctgcccttccttgatattgcacctttggacatcggtggtgctgaccaggaattctttgtggacattggcccagtctgtttcaaataaatgaactcaatctaaattaaaaaagaaagaaatttgaaaaaactttctctttgccatttcttcttcttcttttttaactgaaagctgaatccttccatttcttctgcacatctacttgcttaaattgtgggcaaaagagaaaaagaaggattgatcagagcattgtgcaatacagtttcattaactccttcccccgctcccccaaaaatttgaatttttttttcaacactcttacacctgttatggaaaatgtcaacctttgtaagaaaaccaaaataaaaattgaaaaataaaaaccataaacatttgcaccacttgtggcttttgaatatcttccacagagggaagtttaaaacccaaacttccaaaggtttaaactacctcaaaacactttcccatgagtgtgatccacattgttaggtgctgacctagacagagatgaactgaggtccttgttttgttttgttcataatacaaaggtgctaattaatagtatttcagatacttgaagaatgttgatggtgctagaagaatttgagaagaaatactcctgtattgagttgtatcgtgtggtgtattttttaaaaaatttgatttagcattcatattttccatcttattcccaattaaaagtatgcagattatttgcccaaatcttcttcagattcagcatttgttctttgccagtctcattttcatcttcttccatggttccacagaagctttgtttcttgggcaagcagaaaaattaaattgtacctattttgtatatgtgagatgtttaaataaattgtgaaaaaaatgaaataaagcatgtttggttttccaaaagaacatat

SEQ ID NO: 309 - protein, 1366 aa, Homo sapiens; identical to SEQ ID NO: 195

SEQ ID NO: 310 - DNA, 2150 bp, Homo sapiens
ctcaggttcccggtgcttcgcgcgtctgccgttgtcacaggccagggaggtggcaccaccaggcgaagcttggcgagattgtgtcgtcaagcgcgtacgggcgccaattggccgggcgatgtggcgtggactggcgctggcgcgagcgattggctgcgcggcccgggggcggggccagtgggcggtgcgcgccgcagactgtgctcaaagcgggcgccatccgggaccggcggttgtctgtggccggaggctgatcagtgttctagaacagatcagacattttgtaatgatgcctgaaataaacactaaccacctcgacaagcaacaggttcaactcctggcagagatgtgtatccttattgatgaaaatgacaataaaattggagctgagaccaagaagaattgtcacctgaacgagaacattgagaaaggattattgcatcgagcttttagtgtcttcttattcaacaccgaaaataagcttctgctacagcaaagatcagatgctaagattacctttccaggttgttttacgaatacgtgttgtagtcatccattaagcaatccagccgagcttgaggaaagtgacgcccttggagtgaggcgagcagcacagagacggctgaaagctgagctaggaattcccttggaagaggttcctccagaagaaattaattatttaacacgaattcactacaaagctcagtctgatggtatctggggtgaacatgaaattgattacattttgttggtgaggaagaatgtaactttgaatccagatcccaatgagattaaaagctattgttatgtgtcaaaggaagaactaaaagaacttctgaaaaaagcagccagtggtgaaattaagataacgccatggtttaaaattattgcagcgacttttctctttaaatggtgggataacttaaatcatttgaatcagtttgttgaccatgagaaaatatacagaatgtgaatatgtaggtaaatgattacagaaaaatttatctgcttaacaaacttagaatgactttttccttttaaatttagttctatcattaatttatcattaaatttagttctatcatttggtactatcattaatgtattatatacactgatactttaaaacttgtgtggaaaaaactaacttataattttgtatcacacaccctggatatgtgttctgtttctaagcgacatttgtgagagattattgtaaaatgagagcgagcaaataaaacttaatttaatctttgcagatacatacttatgggaaatttgaacaaatgagtgaaactctgtttttagtaggctgtgataaacatttccggagcacttgcagaggacttgctatttgccaggtgctttatgtatcattaaatttttctcatagttcagaaaaatgtgcaaaggaaactattgtctcgctccttcaaaacagtcttaattaactttcatattagcagattaaactagcagagcaggttcaagggaaattaaatgatatggaccctaatttgtatcattctgagttgattgtgtggtttattcattctggaaacatgttgatacttacagtcagccactgcttttgataagtgatattgattaggttgaatcttcttgtaaatagtatttaccagttagcaaagtctgtgttttcagaattacagtgagcacagaggtgttcataaaatgggaattgagtcccactcggtaagagttgcttaaacttgacactgttgacatttgggctggataaaacccctgtggtggggtctgtgctgtgcattgcaggatggtgagcagcgtccctctcatgtgacacccacagttatgccggatgttgccagatgcccctaggggacagagtcaacccccaactgaggaccactgtcctacagagtcaggaaatattgtagggagaaaaaaataacaacaacaaaggcctgtgttaatgttaaatagatgagattatggaatgtgtatattaatgttaaaaattgtaccttgatcaatgtactttttataaacttgccatagatatctcagatttgaaacctcaagacagatttattattcttaaatgctgtatgataatgaagaaaaataaaaatttatttcttgcaaagttaaaaaaaaaaaaaaaa

SEQ ID NO: 311 - protein, 284 aa, Homo sapiens
MWRGLALARAIGCAARGRGQWAVRAADCAQSGRHPGPAVVCGRRLISVLEQIRHFVMMPEINTNHLDKQQVQLLAEMCILIDENDNKIGAETKKNCHLNENIEKGLLHRAFSVFLFNTENKLLLQQRSDAKITFPGCFTNTCCSHPLSNPAELEESDALGVRRAAQRRLKAELGIPLEEVPPEEINYLTRIHYKAQSDGIWGEHEIDYILLVRKNVTLNPDPNEIKSYCYVSKEELKELLKKAASGEIKITPWFKIIAATFLFKWWDNLNHLNQFVDHEKIYRM

SEQ ID NO: 312 - DNA, 3881 bp, Homo sapiens
gccgcctccgcctctctctttactgcggcgcggggcaaggtgtgcgggcgggaaggggcacgggcacccccgcggtccccgggaggctagagatcatggaagggaagtggttgctgtgtatgttactggtgcttggaactgctattgttgaggctcatgatggacatgatgatgatgtgattgatattgaggatgaccttgacgatgtcattgaagaggtagaagactcaaaaccagataccactgctcctccttcatctcccaaggttacttacaaagctccagttccaacaggggaagtatattttgctgattcttttgacagaggaactctgtcagggtggattttatccaaagccaagaaagacgataccgatgatgaaattgccaaatatgatggaaagtgggaggtagaggaaatgaaggagtcaaagcttccaggtgataaaggacttgtgttgatgtctcgggccaagcatcatgccatctctgctaaactgaacaagcccttcctgtttgacaccaagcctctcattgttcagtatgaggttaatttccaaaatggaatagaatgtggtggtgcctatgtgaaactgctttctaaaacaccagaactcaacctggatcagctccatgacaagaccccttatacgattatgtttggtccagataaatgtggagaggactataaactgcacttcatcttccgacacaaaaaccccaaaacgggtatctatgaagaaaaacatgctaagaggccagatgcagatctgaagacctattttactgataagaaaacacatctttacacactaatcttgaatccagataatagttttgaaatactggttgaccaatctgtggtgaatagtggaaatctgctcaatgacatgactcctcctgtaaatccttcacgtgaaattgaggacccagaagaccggaagcccgaggattgggatgaaagaccaaaaatcccagatccagaagctgtcaagccagatgactgggatgaagatgcccctgctaagattccagatgaagaggccacaaaacccgaaggctggttagatgatgagcctgagtacgtacctgatccagacgcagagaaacctgaggattgggatgaagacatggatggagaatgggaggctcctcagattgccaaccctagatgtgagtcagctcctggatgtggtgtctggcagcgacctgtgattgacaaccccaattataaaggcaaatggaagcctcctatgattgacaatcccagttaccagggaatctggaaacccaggaaaataccaaatccagatttctttgaagatctggaacctttcagaatgactccttttagtgctattggtttggagctgtggtccatgacctctgacattttttttgacaactttatcatttgtgctgatcgaagaatagttgatgattgggccaatgatggatggggcctgaagaaagctgctgatggggctgctgagccaggcgttgtggggcagatgatcgaggcagctgaagagcgcccgtggctgtgggtagtctatattctaactgtagcccttcctgtgttcctggttatcctcttctgctgttctggaaagaaacagaccagtggtatggagtataagaaaactgatgcacctcaaccggatgtgaaggaagaggaagaagagaaggaagaggaaaaggacaagggagatgaggaggaggaaggagaagagaaacttgaagagaaacagaaaagtgatgctgaagaagatggtggcactgtcagtcaagaggaggaagacagaaaacctaaagcagaggaggatgaaattttgaacagatcaccaagaaacagaaagccacgaagagagtgaaacaatcttaagagcttgatctgtgatttcttctccctcctcccctgcaagagtggtcctaggagaggacctggcacaccttaggttgacattcagaaaacttcaagacatcaccatcagcaggctccagttgaacactagtctgtgtaactttaaacatctagcagtaaatacttgcagttgtgatataaaggaccctgtttctgtagaaaagaaaacatttaacataatggttgtgaaatgtaacatgaagcaaactaacttttttttttttaacatctttgtttttaaaatagaatgatagaactttgccagtctttaagatcttggcttaatttaatgtattaatctgtttgtgcaaacataataccaccatttaaaaatgttagggagatgagttgcagtttttataatagattttttttaaagtttggtattgtaaaacattcacacctctgtccctcaaaattgataattacgtttaaagtgcagtcatttgtggttagaatcttgttttgtttgcttccattattgagttcctcctaaggaaattgaggagagggactgaatagaagcccaaattcatataaaagttgcgtttaagttgtattaaaaatagatatataagaaaaaattctttcacttgatgtttgttagaccagaaagtgtgtgtgttctgtagctcagttcccagacagctttttaggtagtggaggaggtggcttcatgtggcacttgggcatttatattccacttgggagggtcaggctgtggccttctggagcaggtggcttgttaaggaacgctagcagggcatggcacgtgagctccggaatagatgtcttcatcacttcttccactgtgtgttgacactgttttccttacctatttcctcagatccccagctttctcctctgctatgcattttcttcacagtgcagcttgcagtccgttgctgaaaatgattataagccctgcataatgttaagctttattgtgattacgtgtatgtttcttctttcttttaagcagacccatacctttccagggtcaaagtacagaatagaatacattgatacaaagtacagaaaaatactttgatttttatccatttcttttactctgtgtaaagacttgagaagtctaattcacaggcaaaccaatacagaattgactgcagttgaacagactagaagtatttgtgggaggagtgacatgaagcatgagttatctgattttttttgtagctgctatatattttaagccttcatttgcaattcatgtaacagttgtgtcataaattacacaataaagcagtcctgttcaaatttttttttaacgtggcttgtagaatttttaaaaaagtgatcttaggtttgttttttcatgcgggatgcagatgggtgctatcagagcctctcccacaccactatagtgtaataatgttattattactctacactgaaacgtattcagagttagatattattttagcttcagttgttctttagaggctttcaaatgtaccgatgatactgtttcttgcactgaatatataaacactccacagtgtttatattgggaagatattgggaaggaaatatatttgtaaaagatgaaggctgtatctatttttttttctttttaaagtttgttcacttaaattcttttgaggatgggatgtatttttcttgctgttcagtgctttttccttttcatctgttgttctgtggtcacagtgaccttagctacatagcagactttcccaaatgtattgattacaaataaacagttgttacttagcaagacctgaaaatatgtctgcaggtttctccttgaagcaaatgtgtgggatcattgcatttccagaaatctgcctccttcaccctccgttgacagtatatgtcatgcctcactttcttctagctgagctttaaatcattagagcttaaattgtcagatcgttcattgcctttccagggttatttagtaaagtttgttgaaaac

SEQ ID NO: 313 - protein, 592 aa, Homo sapiens [sequence omitted]

SEQ ID NO: 314 - DNA, 1032 bp, Homo sapiens
  misc_feature (569)..(569): n is a, c, g, or t
aacaggaagaggacgaaaaaaataaccgtccgcgacgccgagacaaaccggacccgcaaccaccatgaacagcaaaggtcaatatccaacacagccaacctaccctgtgcagcctcctgggaatccagtataccctcagaccttgcatcttcctcaggctccaccctataccgatgctccacctgcctactcagagctctatcgtccgagctttgtgcacccaggggctgccacagtccccaccatgtcagccgcatttcctggagcctctctgtatcttcccatggcccagtctgtggctgttgggcctttaggttccacaatccccatggcttattatccagtcggtcccatctatccacctggctccacagtgctggtggaaggagggtatgatgcaggtgccagatttggagctggggctactgctggcaacattcctcctccacctcctggatgccctcccaatgctgctcagcttgcagtcatgcagggagccaacgtcctcgtaactcagcggaaggggaacttcttcatgggtggttcagatggtggctacaccatctggntgaggaaccaaggccacctttgtgccgggaaagacatcacataccttcagcacttctcacaatgtaactgctttagtcatattaacctgaagttgcagtttagacacatgttgttggggtgtctttctggtgcccaaactttcaggcacttttcaaatttaataaggaaccatgtaatggtagcagtacctccctaaagcattttgaggtaggggaggtatccattcataaaatgaatgtgggtgaagcgccctaaggattttcctttaatttctctggagtaatactgtaccatactggtctttgcttttagtaataaacatcaaattaggtttggagggactttgatctcctaagawtaaagttgcaaattattctgattggcttwaacccytwaagcttgataaaaatacttgtawaawggacgcatagtgytgcyttccttccaycctgccaccatcca

SEQ ID NO: 315 - protein, 168 aa, Homo sapiens
MNSKGQYPTQPTYPVQPPGNPVYPQTLHLPQAPPYTDAPPAYSELYRPSFVHPGAATVPTMSAAFPGASLYLPMAQSVAVGPLGSTIPMAYYPVGPIYPPGSTVLVEGGYDAGARFGAGATAGNIPPPPPGCPPNAAQLAVMQGANVLVTQRKGNFFMGGSDGGYTIW

SEQ ID NO: 316 - DNA, 1466 bp, Homo sapiens
gagaatgaaagtggatgcccgcgaatcccggaagtcagactgtttttttcagttccctggaggctttttgatactgattcgcgtacacctgttgtttgaaagctctcagcgggacaatgctgacccagctgaaagcaaaatcagaggggaagcttgcaaaacagatttgcaaagttgtgttggatcattttgaaaaacagtattccaaagaactcggagatgcctggaatacagtaagggagatactaacatctccatcatgctggcaatatgctgtcctgcttaaccgattcaattatccttttgaactggaaaaggatttacatttgaagggctatcacacactctctcagggatctttacccaactatcctaaatcagtgaagtgttaccttagcagaactccgggccgaatcccttcagaaagacaccaaattggaaacctgaaaaaatattatctcctaaatgctgcttctcttctcccagtgttggctctggaattaagggatggggagaaggttctggatctctgtgctgctcctggagggaaatcaatagctctgctgcagtgtgcttgtccaggttatcttcattgtaatgaatatgatagtctgagattgaggtggctaaggcagacgttggaatctttcatcccacagcctttgataaatgtaattaaagtgtctgaattggatggcagaaaaatgggagatgcccagcctgaaatgtttgacaaggtgttagtggatgctccgtgttcaaatgatcgaagctggttgttttcttctgactctcagaaggcatcctgtaggataagtcaaaggaggaatttgcctcttctacagatagagctgttaaggtctgcaattaaggccttacgtcctggagggatacttgtatactctacatgcacgctttccaaggcagaaaatcaagatgtgatcagtgaaattttaaactcccacggtaacatcatgcctatggacattaaaggaatagcaaggacttgctcccacgacttcacatttgctcccactggccaggaatgtgggctcttagtgattccagataagggcaaagcctggggcccaatgtatgtagccaaattgaagaaatcatggagcacaggaaaatggtgacatgaatttgtaaactgtgtttatgtgttattatatttatatttctgaactcagtacatgttaatatttaaataattatgcagtaactttctctgggtctgtttggaatcctatttagttaatactttagcatcttagaatctaggcttgagaattgttcaggtgtatttttttcctagaaatatatctgtaacaatgatttaaggtggtgcagatggtgtttgttctatattataaatctgctgtctttgcttggcattttatagttaaattaattagaatatgtggttttatgctaaaaaaaaaaaaaaaaaaaaaaaaaaaaaa

SEQ ID NO: 317 - protein, 340 aa, Homo sapiens
MLTQLKAKSEGKLAKQICKVVLDHFEKQYSKELGDAWNTVREILTSPSCWQYAVLLNRFNYPFELEKDLHLKGYHTLSQGSLPNYPKSVKCYLSRTPGRIPSERHQIGNLKKYYLLNAASLLPVLALELRDGEKVLDLCAAPGGKSIALLQCACPGYLHCNEYDSLRLRWLRQTLESFIPQPLINVIKVSELDGRKMGDAQPEMFDKVLVDAPCSNDRSWLFSSDSQKASCRISQRRNLPLLQIELLRSAIKALRPGGILVYSTCTLSKAENQDVISEILNSHGNIMPMDIKGIARTCSHDFTFAPTGQECGLLVIPDKGKAWGPMYVAKLKKSWSTGKW

SEQ ID NO: 318 - DNA, 1787 bp, Homo sapiens
ggtagcaggaggctggaagaaaggacagaagtagctctggctgtgatggggatcttactgggcctgctactcctggggcacctaacagtggacacttatggccgtcccatcctggaagtgccagagagtgtaacaggaccttggaaaggggatgtgaatcttccctgcacctatgaccccctgcaaggctacacccaagtcttggtgaagtggctggtacaacgtggctcagaccctgtcaccatctttctacgtgactcttctggagaccatatccagcaggcaaagtaccagggccgcctgcatgtgagccacaaggttccaggagatgtatccctccaattgagcaccctggagatggatgaccggagccactacacgtgtgaagtcacctggcagactcctgatggcaaccaagtcgtgagagataagattactgagctccgtgtccagaaactctctgtctccaagcccacagtgacaactggcagcggttatggcttcacggtgccccagggaatgaggattagccttcaatgccaggctcggggttctcctcccatcagttatatttggtataagcaacagactaataaccaggaacccatcaaagtagcaaccctaagtaccttactcttcaagcctgcggtgatagccgactcaggctcctatttctgcactgccaagggccaggttggctctgagcagcacagcgacattgtgaagtttgtggtcaaagactcctcaaagctactcaagaccaagactgaggcacctacaaccatgacataccccttgaaagcaacatctacagtgaagcagtcctgggactggaccactgacatggatggctaccttggagagaccagtgctgggccaggaaagagcctgcctgtctttgccatcatcctcatcatctccttgtgctgtatggtggtttttaccatggcctatatcatgctctgtcggaagacatcccaacaagagcatgtctacgaagcagccagggcacatgccagagaggccaacgactctggagaaaccatgagggtggccatcttcgcaagtggctgctccagtgatgagccaacttcccagaatctgggcaacaactactctgatgagccctgcataggacaggagtaccagatcatcgcccagatcaatggcaactacgcccgcctgctggacacagttcctctggattatgagtttctggccactgagggcaaaagtgtctgttaaaaatgccccattaggccaggatctgctgacataattgcctagtcagtccttgccttctgcatggccttcttccctgctacctctcttcctggatagcccaaagtgtccgcctaccaacactggagccgctgggagtcactggctttgccctggaatttgccagatgcatctcaagtaagccagctgctggatttggctctgggcccttctagtatctctgccgggggcttctggtactcctctctaaataccagagggaagatgcccatagcactaggacttggtcatcatgcctacagacactattcaactttggcatcttgccaccagaagacccgagggaggctcagctctgccagctcagaggaccagctatatccaggatcatttctctttcttcagggccagacagcttttaattgaaattgttatttcacaggccagggttcagttctgctcctccactataagtctaatgttctgactctctcctggtgctcaataaatatctaatcataacagcaaaaaaaaaaaaaaaaaaa

SEQ ID NO: 319 - protein, 399 aa, Homo sapiens
MGILLGLLLLGHLTVDTYGRPILEVPESVTGPWKGDVNLPCTYDPLQGYTQVLVKWLVQRGSDPVTIFLRDSSGDHIQQAKYQGRLHVSHKVPGDVSLQLSTLEMDDRSHYTCEVTWQTPDGNQVVRDKITELRVQKLSVSKPTVTTGSGYGFTVPQGMRISLQCQARGSPPISYIWYKQQTNNQEPIKVATLSTLLFKPAVIADSGSYFCTAKGQVGSEQHSDIVKFVVKDSSKLLKTKTEAPTTMTYPLKATSTVKQSWDWTTDMDGYLGETSAGPGKSLPVFAIILIISLCCMVVFTMAYIMLCRKTSQQEHVYEAARAHAREANDSGETMRVAIFASGCSSDEPTSQNLGNNYSDEPCIGQEYQIIAQINGNYARLLDTVPLDYEFLATEGKSVC

SEQ ID NO: 320 - DNA, 6636 bp, Homo sapiens
gtcgacaataacaaaccaagccgcggcggtgtccgcggccctgccgagccctcggcgttgcctcagaatcccccagtcgcctgggcccctcggctctgacaggccgcggccttctgtcccccggccccagacccagagccgaggggcctgctcgcgtccttgtccgcccggacccctccctgcctcctagagttcggggccgcggcgggcgggcgcccgggacgccggcggttgtgtcggcttagcggtgccgaatgggcggttggtaaccgctgccgaggactaggcggcggcggaagatggtgccgggggtcgctggctctgctgctgccgccggcgaaggaggaggcgttgccggttttctgagtttaaccagtaatgccattcagttgccaatctcaagcaaagcaaacataagccagttttaatctactttttaagaaaagtggtagtccttttcacagtgcctgacgtaactgtatcagagggtgaggtataagctcacagaattcagataaatcatcatgaagttatatgtatttctggttaacactggaactactctaacatttgacactgaacttacagtgcaaactgtggcagaccttaagcatgccattcaaagcaaatacaagattgctattcaacaccaggtgctggtggtcaatggaggagaatgcatggctgcagatcgaagagtgtgtacctacagtgctgggacggatacaaatccaatttttctttttaacaaagaaatgatcttatgtgatcgtccacctgctattcctaaaactaccttttcgacagaaaatgacatggaaataaaagttgaagaatctcttatgatgcctgcagtttttcatactgttgcttcaaggacacagcttgcattggaaatgtatgaagttgccaagaaactttgttctttttgtgaaggtcttgtacatgatgaacatcttcaacaccaaggctgggctgcaatcatggccaacctggaggactgttcaaattcataccaaaagctacttttcaagtttgaaagtatttattcaaattatctgcagtccatagaagacatcaagttaaaacttactcatttaggaactgcagtttcagtaatggccaagattccactgttggagtgcctaaccagacatagttacagagaatgtttgggaagactggattctttacctgaacatgaagactcagaaaaagctgagacgaaaagatccactgaactggtgctctctcctgatatgcctagaacaactaacgaatctttgttaacctcatttcccaagtcagtggaacatgtgtccccagataccgcagatgctgaaagtggcaaagaaattagggaatcttgtcaaagtactgttcatcagcaagatgaaactacgattgacactaaagatggtgatctgcccttttttaatgtctctttgttagactggataaatgttcaagatagacctaatgatgtggaatctttggtcaggaagtgctttgattctatgagcaggcttgatccaaggattattcgaccatttatagcagaatgccgtcaaactattgccaaacttgataatcagaatatgaaagccattaaaggacttgaagatcggctctacgccctggaccagatgattgctagctgtggccgactggtgaatgaacagaaagagcttgctcagggatttttagctaatcagaagagagctgaaaacttaaaggatgcatctgtattacctgatttatgcctgagtcacgcaaatcagttgatgattatgttgcaaaatcatagaaaactgttagatattaagcagaagtgtaccactgccaaacaagaactagcaaataacctacatgtcagactgaagtggtgttgctttgtaatgcttcatgctgatcaagatggagagaagttacaagctttgctccgcctcgtaatagagctgttagaaagagtcaaaattgttgaagctcttagtacagttcctcagatgtactgcttagctgttgttgaggttgtaagaagaaaaatgttcataaaacactacagggagtgggctggtgctttagtcaaagatggaaagagattatatgaagcagaaaaatcaaaaagggaatcctttgggaaattatttaggaagtcttttttaagaaatcgtctgtttaggggactggactcctggcccccttccttttgtactcaaaagcctcgaaagtttgactgtgaacttccagatatttcattaaaagatttacagtttctgcaatcattttgtccttcggaagttcagccattcctcagggttcccttactttgtgactttgaacctctacaccagcatgtacttgctctacataatttggtaaaagcagcacaaagtttggatgaaatgtcacagaccattacagatctactgagtgaacaaaaggcatctgtgagtcagacatccccacagtctgcttcttcaccaaggatggaaagtacagcaggaattacaactactacctcaccgagaactcctccaccactgactgttcaggatcccttatgtcctgcagtttgtcccttagaagaattatctccagatagtattgatgcacatacgtttgattttgaaactattccccatccaaacatagaacagactattcaccaagtttctttagacttggattcattagcagaaagtcctgaatcagattttatgtctgctgtgaatgagtttgtaatagaagaaaatttgtcgtctcctaatcctataagtgatccacaaagcccagaaatgatggtggaatcactttattcatcagttatcaatgcgatagacagtagacgaatgcaggatacaaatgtatgtggtaaggaggattttggagatcatacttctctgaatgtccagttggaaagatgtagagttgttgcccaagactctcacttcagtatacaaaccattaaggaagacctttgccactttagaacatttgtacaaaaagaacagtgtgacttctcaaattcattaaaatgtacagcagtagaaataagaaacattattgaaaaagtaaaatgttctctggaaataacactaaaagaaaaacatcaaaaagaactactgtctttaaaaaatgaatatgaaggtaaacttgacggactaataaaggaaactgaagagaatgaaaacaaaattaaaaaattgaagggagagttagtatgccttgaggaggttttacaaaataaagataatgaatttgctttggttaaacatgaaaaagaagctgtaatctgcctgcagaatgaaaaggatcagaagttgttagagatggaaaatataatgcactctcaaaattgtgaaattaaagaactgaagcagtcacgagaaatagtgttagaagacttaaaaaagctccatgttgaaaatgatgagaagttacagttattgagggcagaacttcagtccttggagcaaagtcatctaaaggaattagaggacacacttcaggttaggcacatacaagagtttgagaaggttatgacagaccacagagtttctttggaggaattaaaaaaggaaaaccaacaaataattaatcaaatacaagaatctcatgctgaaattatccaggaaaaagaaaaacagttacaggaattaaaactcaaggtttctgatttgtcagacacgagatgcaagttagaggttgaacttgcgttgaaggaagcagaaactgatgaaataaaaattttgctggaagaaagcagagcccagcagaaggagaccttgaaatctcttcttgaacaagagacagaaaatttgagaacagaaattagtaaactcaaccaaaagattcaggataataatgaaaattatcaggtgggcttagcagagctaagaactttaatgacaattgaaaaagatcagtgtatttccgagttaattagtagacatgaagaagaatctaatatacttaaagctgaattaaacaaagtaacatctttgcataaccaagcatttgaaatagaaaaaaacctaaaagaacaaataattgaactgcagagtaaattggattcagaattgagtgctcttgaaagacaaaaagatgaaaaaattacccaacaagaagagaaatacgaagctattatccagaaccttgagaaagacagacaaaaattggtcagcagccaggagcaagacagagaacagttaattcagaagcttaattgtgaaaaagatgaagctattcagactgccctaaaagaatttaaattggagagagaagttgttgagaaagagttattagaaaaagttaaacatcttgagaatcaaatagcaaaaagtcctgccattgactctaccagaggagattcttcaagcttagttgctgaacttcaagaaaagcttcaggaagaaaaagctaagtttctagaacaacttgaagagcaagaaaaaagaaagaatgaagaaatgcaaaatgttcgaacatctttgattgcggaacaacagaccaattttaacactgttttaacaagagagaaaatgagaaaagaaaacataataaatgatcttagtgataagttgaaaagtacaatgcagcaacaagaacgggataaagatttgatagagtcactttctgaagatcgagctcgtttgcttgaggaaaagaaaaagcttgaagaagaagtcagtaagttgcgtagtagcagttttgttccttcaccatatgtagctacagccccagaactttatggagcttgtgcacctgaactcccaggtgaatcagatagatccgctgtggaaacagcagatgaaggaagagtggattcagcaatggagacaagcatgatgtctgtacaagaaaatattcatatgttgtctgaagaaaaacagcggataatgctgttagaacgaacattgcaattgaaagaagaagaaaataaacggttaaatcaaagactgatgtctcagagcatgtcttcagtatcttcaaggcattctgaaaagatagctattagagattttcaggtgggagatttggtactcatcatcctagacgaacgccatgacaattatgtgttatttactgttagtcctactttatattttctacattcagagtctctacctgccctggatctcaaaccaggtgagggtgcttcaggtgcatctagaagaccctgggtacttggaaaagtaatggaaaaagaatactgtcaagccaaaaaggcacaaaacagatttaaagttcctttggggacaaagttttacagagtgaaagccgtatcatggaataagaaagtataacttatggacaaaattaatacattctatgacatttttttctgatttgtcctgcagtgctcattcatcactccaaaaacagcaggccatctttttatgcaaaagtcagcgtgacaatatacttcactggtgtacatcgtttactttttaactggcttcattttaggaataataaattcatcagaatccttggctgaattaaaatggtttttgttttttggtttttttttttacccagacaactctagaaatgcggaccaaactacttcattttctcaaagggcataccttgtgcattgtggcttatgatgagccatattaattgcctgttaaatatacactagcttgaacttagatgttaaatgttattattaccagcatttgtccttttgtgaaatcagtatcagaatacttgcactctttaacacattctttataaaatgtataaattattcagaactatttaaaataaagaggagtgttattgcatgctgataatcattttgagtttgcctcagtagatactaaagcaaattgtttcagtttttttaaatgccctttgatgtttcaaaaaaaaaaaggaactgtaatttgattgactgattttaagatcagccataagtaatcagcaatcttcaaaagcactttcagtggattggtcatctgggttctaaagggaagagtctgtgctactaaccatttcaaatgcagactcaaaccttcccaacatctttatgactctagaataatcatattgatgaaatcgtaattcatggttgagtttcagaacaaaagatattcattgcacattaaccatttagaggtcatttaaataacaaaatattgtattgtaaaagaactgtacaattttaaaacaataaagatttgaacctgtaaatgtgtgtgccttttaaagaaggatacatttttaatatatttgagtgattgctgggaagtgtgaaaatattgttatgtatcatatcaaagagaaacatgtttattacaaaaatgttctttaactatatactatgtaacagggtaaacagtgttatgtagaatagaattgtgtaaactagatctttagagaagttgccattgagcaaagttatttaaatgagttagttgagttggatgagaattgtttgaggtttgttgctagagaacaataataaaataattctttttcagaaaatatttaatttcttcataaaaataagttaaatatttttttaaatatgtatatctaatagtacaaaatggaataaacatcatagtgtatagaaaactgaatttgacaagttaatgaataaatgaacaaatgatttcaaaa

SEQ ID NO: 321 - protein, 1594 aa, Homo sapiens
MKLYVFLVNTGTTLTFDTELTVQTVADLKHAIQSKYKIAIQHQVLVVNGGECMAADRRVCTYSAGTDTNPIFLFNKEMILCDRPPAIPKTTFSTENDMEIKVEESLMMPAVFHTVASRTQLALEMYEVAKKLCSFCEGLVHDEHLQHQGWAAIMANLEDCSNSYQKLLFKFESIYSNYLQSIEDIKLKLTHLGTAVSVMAKIPLLECLTRHSYRECLGRLDSLPEHEDSEKAETKRSTELVLSPDMPRTTNESLLTSFPKSVEHVSPDTADAESGKEIRESCQSTVHQQDETTIDTKDGDLPFFNVSLLDWINVQDRPNDVESLVRKCFDSMSRLDPRIIRPFIAECRQTIAKLDNQNMKAIKGLEDRLYALDQMIASCGRLVNEQKELAQGFLANQKRAENLKDASVLPDLCLSHANQLMIMLQNHRKLLDIKQKCTTAKQELANNLHVRLKWCCFVMLHADQDGEKLQALLRLVIELLERVKIVEALSTVPQMYCLAVVEVVRRKMFIKHYREWAGALVKDGKRLYEAEKSKRESFGKLFRKSFLRNRLFRGLDSWPPSFCTQKPRKFDCELPDISLKDLQFLQSFCPSEVQPFLRVPLLCDFEPLHQHVLALHNLVKAAQSLDEMSQTITDLLSEQKASVSQTSPQSASSPRMESTAGITTTTSPRTPPPLTVQDPLCPAVCPLEELSPDSIDAHTFDFETIPHPNIEQTIHQVSLDLDSLAESPESDFMSAVNEFVIEENLSSPNPISDPQSPEMMVESLYSSVINAIDSRRMQDTNVCGKEDFGDHTSLNVQLERCRVVAQDSHFSIQTIKEDLCHFRTFVQKEQCDFSNSLKCTAVEIRNIIEKVKCSLEITLKEKHQKELLSLKNEYEGKLDGLIKETEENENKIKKLKGELVCLEEVLQNKDNEFALVKHEKEAVICLQNEKDQKLLEMENIMHSQNCEIKELKQSREIVLEDLKKLHVENDEKLQLLRAELQSLEQSHLKELEDTLQVRHIQEFEKVMTDHRVSLEELKKENQQIINQIQESHAEIIQEKEKQLQELKLKVSDLSDTRCKLEVELALKEAETDEIKILLEESRAQQKETLKSLLEQETENLRTEISKLNQKIQDNNENYQVGLAELRTLMTIEKDQCISELISRHEEESNILKAELNKVTSLHNQAFEIEKNLKEQIIELQSKLDSELSALERQKDEKITQQEEKYEAIIQNLEKDRQKLVSSQEQDREQLIQKLNCEKDEAIQTALKEFKLEREVVEKELLEKVKHLENQIAKSPAIDSTRGDSSSLVAELQEKLQEEKAKFLEQLEEQEKRKNEEMQNVRTSLIAEQQTNFNTVLTREKMRKENIINDLSDKLKSTMQQQERDKDLIESLSEDRARLLEEKKKLEEEVSKLRSSSFVPSPYVATAPELYGACAPELPGESDRSAVETADEGRVDSAMETSMMSVQENIHMLSEEKQRIMLLERTLQLKEEENKRLNQRLMSQSMSSVSSRHSEKIAIRDFQVGDLVLIILDERHDNYVLFTVSPTLYFLHSESLPALDLKPGEGASGASRRPWVLGKVMEKEYCQAKKAQNRFKVPLGTKFYRVKAVSWNKKV

SEQ ID NO: 322 - DNA, 2165 bp, Homo sapiens
ccccgagaggcccggttcctttaggccgcctgcccgcctccagctctcggggtcggctctaggaggcgccctcaggagaggggcgggcgctctattccagagaccgagtggcagggcggccactgtggcggggctctttccccgtttcgcctcagctacccctcagctccggtagtcgccagtccggggtcgtcgccgtttggggcgggagctgctcggccccgccgccgtccccgtcgccgcttccgggtccaggcccctcgggccgcctgccgccgtcatgaggctgcgggtgcggcttctgaagcggacctggccgctggaggtgcccgagacggagccgacgctggggcatttgcgctcgcacctgaggcagtccctgctgtgcacctgggggtacagttctaatacccgatttacaattacattgaactacaaggatcccctcactggagatgaagagaccttggcttcatatgggattgtttctggggacttgatatgtttgattcttcaagatgacattccagcgcctaatataccttcatccacagattcagagcattcttcactccagaataatgagcaaccctctttggccaccagctccaatcagactagcatacaggatgaacaaccaagtgattcattccaaggacaggcagcccagtctggtgtttggaatgacgacagtatgttagggcctagtcaaaattttgaagctgagtcaattcaagataatgcgcatatggcagagggcacaggtttctatccctcagaacccatgctctgtagtgaatcggtggaagggcaagtgccacattcattagagaccttgtatcaatcagctgactgttctgatgccaatgatgccttgatagtgttgatacatcttctcatgttggagtcaggttacatacctcagggcaccgaagccaaagcactgtccatgccggagaagtggaagttgagcggggtgtataagctgcagtacatgcatcctctctgcgagggcagctccgctactctcacctgtgtgcctttgggaaacctgattgttgtaaatgctacactaaaaatcaacaatgagattagaagtgtgaaaagattgcagctgctaccagaatcttttatttgcaaagagaaactaggggaaaatgtagccaacatatacaaagatcttcagaaactctctcgcctctttaaagaccagctggtgtatcctcttttggcttttacccgacaagcactgaacctaccagatgtatttgggttggtcgtcctcccattggaactgaaactacggatcttccgacttctggatgttcgttccgtcttgtctttgtctgcggtttgtcgtgacctctttactgcttcaaatgacccactcctgtggaggtttttatatctgcgtgattttcgagacaatactgtcagagttcaagacacagattggaaagaactgtacaggaagaggcacatacaaagaaaagaatccccgaaagggcggtttgtgatgctcctgccatcgtcaactcacaccattccattctatcccaaccccttgcaccctaggccatttcctagctcccgccttcctccaggaattatcgggggtgaatatgaccaaagaccaacacttccctatgttggagacccaatcagttcactcattcctggtcctggggagacgcccagccagtttcctccactgagaccacgctttgatccagttggcccacttccaggacctaaccccatcttgccagggcgaggcggccccaatgacagatttccctttagacccagcaggggtcggccaactgatggccggctgtcattcatgtgattgatttgtaatttcatttctggagctccatttgtttttgtttctaaactacagatgtcaactccttggggtgctgatctcgagtgttattttctgattgtggtgttgagagttgcactcccagaaaccttttaagagatacatttatagccctaggggtggtatgacccaaaggttcctctgtgacaaggttggccttgggaatagttggctgccaatctccctgctcttggttctcctctagattgaagtttgttttctgatgctgttcttaccagattaaaaaaaagtgtaaattaaaaaaaaaaaaaaaaaa

SEQ ID NO: 323 - protein, 522 aa, Homo sapiens
MRLRVRLLKRTWPLEVPETEPTLGHLRSHLRQSLLCTWGYSSNTRFTITLNYKDPLTGDEETLASYGIVSGDLICLILQDDIPAPNIPSSTDSEHSSLQNNEQPSLATSSNQTSIQDEQPSDSFQGQAAQSGVWNDDSMLGPSQNFEAESIQDNAHMAEGTGFYPSEPMLCSESVEGQVPHSLETLYQSADCSDANDALIVLIHLLMLESGYIPQGTEAKALSMPEKWKLSGVYKLQYMHPLCEGSSATLTCVPLGNLIVVNATLKINNEIRSVKRLQLLPESFICKEKLGENVANIYKDLQKLSRLFKDQLVYPLLAFTRQALNLPDVFGLVVLPLELKLRIFRLLDVRSVLSLSAVCRDLFTASNDPLLWRFLYLRDFRDNTVRVQDTDWKELYRKRHIQRKESPKGRFVMLLPSSTHTIPFYPNPLHPRPFPSSRLPPGIIGGEYDQRPTLPYVGDPISSLIPGPGETPSQFPPLRPRFDPVGPLPGPNPILPGRGGPNDRFPFRPSRGRPTDGRLSFM

SEQ ID NO: 324 - DNA, 1459 bp, Homo sapiens
agaaggggtcctggtgacgagtcccgcgttctctccttgaatccactcgccagcccgccgccctctgccgccgcaccctgcacacccgcccctctcctgtgccaggaacttgctactaccagcaccatgccctaccaatatccagcactgaccccggagcagaagaaggagctgtctgacatcgctcaccgcatcgtggcacctggcaagggcatcctggctgcagatgagtccactgggagcattgccaagcggctgcagtccattggcaccgagaacaccgaggagaaccggcgcttctaccgccagctgctgctgacagctgacgaccgcgtgaacccctgcattgggggtgtcatcctcttccatgagacactctaccagaaggcggatgatgggcgtcccttcccccaagttatcaaatccaagggcggtgttgtgggcatcaaggtagacaagggcgtggtcccctggcagggacaaatggcgagactaccacccaagggttggatgggctgtctgagcgctgtgcccagtacaagaaggacggagctgacttcgccaagtggcgttgtgtgctgaagattggggaacacaccccctcagccctcgccatcatggaaaatgccaatgttctggcccgttacgccagtatctgccagcagaatggcattgtgcccatcgtggagcctgagatcctccctgatggggaccatgacttgaagcgctgcctgtatgtgaccgagaaggtgctggctgctgtctacaaggctctgagtgaccaccacatctacctggaaggcaccttgctgaagcccaacatggtcaccccaggccatgcttgcactcagaagttttctcatgaggagattgccatggcgaccgtcacagcgccgcgccgcacagtgccccccgctgtcactgggatcaccttcctgtctggaggccagagtgaggaggaggcgtccatcaacctcaatgccattaacaagtgccccctgctgaagccctgggccctgaccttctcctacggccgagccctgcaggcctctgccctgaaggcctggggcgggaagaaggagaacctgaaggctgcgcaggaggagtatgtcaagcgagccctggccaacagccttgcctgtcaaggaaagtacactccgagcggtcaggctggggctgctgccagcgagtccctcttcgtctctaaccacgcctattaagcggaggtgttcccaggctgcccccaacactccaggccctgccccctcccactcttgaagaggaggccgcctcctcggggctccaggctggcttgcccgcgctctttcttccctcgtgacagtggtgtgtggtgtcgtctgtgaatgctaagtccatcaccctttccggcacactgccaaataaacagctatttaagggggaaaaaaaaaaaaaaaaaaaaaaaaaaaaaaaaaaaaaa

SEQ ID NO: 325 - protein, 364 aa, Homo sapiens; identical to SEQ ID NO: 12

SEQ ID NO: 326 - DNA, 873 bp, Homo sapiens
  misc_feature (622)..(622): n is a, c, g, or t
tttttttttttcagtgtggaaaaaaatctttatttcaaagtaaaatgcacaaagtctcatacagcagataaaatcagtgttactgctctcagatgttaaggttagcaacctttctggcatatgctaattcatcatgaactcccaatagctgaactgaatggcttttaagtacagctataaggtctcatggtataattccttttgttgatgccagtgacaggattttaaaagctacattccattaaaaattaaaaatacagcagcttttccaggggaactagatcccaaaattgtacccagaactcttgtctaagatattaagttaaatatcttgcatgtatatatcattatagtaaatcagtattcttgacaaccacagtgtaagaaattaaactttggctaattgttttccccatcatgaaatcagtcttttgctgtcttcataaataaattatgaccaaacattacaaatactttatacatgtttactgatttacagagaatatttaataatcagaactcaccagtttcaatagtattgtacattaaattataagcaatataaccactgctacaaaagttatctaagttaatccaagataaaaactgtgtctagagtttnaatacattgaaataggaaagaaaatagaaattagaaaatagtcttcgagttctgaaaatctagaaggattctccaacatctgctctcttatctcgacatttgcttcagctttgggttcgagctttgagggctgcgaggttataaaatggctttcgaaacggaaaatctccctcggttttaggcgtgccggcctccagctcacccgggggtcccagttccaataccttccgagggattcccttggccgccag

SEQ ID NO: 327 - protein, 453 aa, Homo sapiens
MPKNKKRNTPHRGSSAGGGGSGAAAATAATAGGQHRNVQPFSDEDASIETMSHCSGYSDPSSFAEDGPEVLDEEGTQEDLEYKRKGLIDLTLDKSAKTRQAALEGIKNALASKMLYEFILERRMTLTDSIERCLKKGKSDEQRAAAALASVLCIQLGPGIESEEILKTLGPILKKIICDGSASMQARQTCATCFGVCCFIATDDITELYSTLECLENIFTKSYLKEKDTTVICSTPNTVLHISSLLAWTLLLTICPINEVKKKLEMHFHKLPSLLSCDDVNMRIAAGESLALLFELARGIESDFFYEDMESLTQMLRALATDGNKHRAKVDKRKQRSVFRDVLRAVEERDFPTETIKFGPERMYIDCWVKKHTYDTFKEVLGSGMQYPLAVKMEFLENVFETWTPSDALMLQRLKTMKISRFERHLYNSAAFKARTKARSKCRDKRADVGEFF

SEQ ID NO: 328 - DNA, 2891 bp, Homo sapiens
gcttcccttccacgtctcccggaagcggtagcagggccccggcgggtcggggaggaggtttactcagcttgggccccctccgggccagccgccgagggggcgcggcccaggacggcggctaggccgtagtgcagcctctccggagtcctcaggtttgccaataggattatcctgctgccatcatgtcttggtttgttgatcttgctggaaaggcagaagatcttttaaaccgagttgatcaaggggctgcaacagctctcagtaggaaagacaatgccagcaacatatatagcaaaaatactgactatactgaacttcaccagcaaaatacagatttgatatatcagactggacctaaatctacgtatatttcatcagcagctgataacattcgaaatcaaaaagccaccatcttagctggcactgcaaatgtgaaagtaggatctcggacaccagtagaggcctctcatcctgttgaaaatgcatctgttcctaggccttcatcccattttgtgcgaagaaaaaagtcagaacctgatgatgagctgctgtttgattttcttaatagttcacagaaggagcctaccgggagggtggaaatcagaaaggaaaaaggcaagacacctgtctttcagagctctcagacatcaagtgtcagttctgtgaaccccagtgtaaccaccatcaaaaccattgaagaaaattcttttgggagccaaacccacgaagctgccagtaactcagattctagccatgaaggtcaagaggaatcttcaaaggaaaatgtgtcatcaaatgctgcctgccctgaccacaccccaacacctaatgatgatggcaaatcacatgaactgtctaaccttcgactggagaatcagctgctgaggaatgaagttcagtctttaaatcaagaaatggcctcgttactccaaagatccaaagagactcaagaagaattaaacaaagcaagagcaagagttgaaaagtggaatgctgaccattcaaagagtgatcgaatgactcgaggactccgagcccaagtagatgacctgactgaagctgtggctgcaaaggattcccagctggctgtactgaaagtgagactccaggaagctgaccagctactgagtactcgcacagaagcattagaagccttacagagtgaaaaatcacgaataatgcaggatcaaagtgaaggtaacagcctgcagaatcaagctctgcagacttttcaggagagactgcatgaagcggatgccactctgaagagagagcaggagagctataaacagatgcagagcgagtttgctgcacgccttaataaagtggaaatggaacgtcagaatttagcagaagcaattacactggccgaaagaaaatactcagatgagaagaagagggttgatgaactgcagcagcaagtcaagctgtataagttgaacttggagtcctctaagcaggaattaattgactacaagcaaaaagctactagaatactgcaatctaaggaaaaattgattaacagcttgaaagaaggctctggttttgaaggcctagatagcagcactgccagtagcatggagctggaagaacttcggcatgagaaagagatgcagagggaggaaatacagaagctgatgggccagatacatcagctcagatccgaattacaggatatggaggcacagcaagttaatgaagcagaatcagcaagagaacagttacaggatctgcatgaccaaatagctgggcagaaagcatccaaacaagaactagagacagaactggagcgactgaagcaggagttccactatatagaagaagatctttatcgaacaaagaacacattgcaaagcagaattaaagatcgagacgaagaaattcaaaaactcaggaatcagcttaccaataaaactttaagcaatagcagtcagtctgagttagaaaatcgactccatcagctaacagagactctcatccagaaacagaccatgctggagagtctcagcacagaaaagaactccctggtctttcaactggagcgcctcgaacagcagatgaactccgcctctggaagtagtagtaatgggtcttcgattaatatgtctggaattgacaatggtgaaggcactcgtctgcgaaatgttcctgttctttttaatgacacagaaactaatctggcaggaatgtacggaaaagttcgcaaagctgctagttcaattgatcagtttagtattcgcctgggaatttttctccgaagataccccatagcgcgagtttttgtaattatatatatggctttgcttcacctctgggtcatgattgttctgttgacttacacaccagaaatgcaccacgaccaaccatatggcaaatgaaccaagcccagttgttgcagtgattggttgtctttttctagacttgggatctgcaagaaggccaattgcctaaaatttctgagaacagtgcacaagattattttatcactacaagcttttaactttttaagttattgtacaagtattctacctaaatcttccaatttcctttaaatggtaagagtttctaaaacagacaataatttaacaagctcagctctgctttatctgagtttagtggtcctaatatatatgtagagaaagatggtggggttgttcacctctgtacagaccatctgtatgttaggtgacattgattatgggttataatcagggaaactaattgtatttagtgacaaaaataaaaagtttttttttataattcagtctgcttttggattttcatatatttaactttgcaaaaagatttactttgtacatgttacaggcttgattggtgtaaatctttttataaatacataaataaaagaaaaatatgcatttttcttttct

SEQ ID NO: 329 - protein, 731 aa, Homo sapiens
MSWFVDLAGKAEDLLNRVDQGAATALSRKDNASNIYSKNTDYTELHQQNTDLIYQTGPKSTYISSAADNIRNQKATILAGTANVKVGSRTPVEASHPVENASVPRPSSHFVRRKKSEPDDELLFDFLNSSQKEPTGRVEIRKEKGKTPVFQSSQTSSVSSVNPSVTTIKTIEENSFGSQTHEAASNSDSSHEGQEESSKENVSSNAACPDHTPTPNDDGKSHELSNLRLENQLLRNEVQSLNQEMASLLQRSKETQEELNKARARVEKWNADHSKSDRMTRGLRAQVDDLTEAVAAKDSQLAVLKVRLQEADQLLSTRTEALEALQSEKSRIMQDQSEGNSLQNQALQTFQERLHEADATLKREQESYKQMQSEFAARLNKVEMERQNLAEAITLAERKYSDEKKRVDELQQQVKLYKLNLESSKQELIDYKQKATRILQSKEKLINSLKEGSGFEGLDSSTASSMELEELRHEKEMQREEIQKLMGQIHQLRSELQDMEAQQVNEAESAREQLQDLHDQIAGQKASKQELETELERLKQEFHYIEEDLYRTKNTLQSRIKDRDEEIQKLRNQLTNKTLSNSSQSELENRLHQLTETLIQKQTMLESLSTEKNSLVFQLERLEQQMNSASGSSSNGSSINMSGIDNGEGTRLRNVPVLFNDTETNLAGMYGKVRKAASSIDQFSIRLGIFLRRYPIARVFVIIYMALLHLWVMIVLLTYTPEMHHDQPYGK

SEQ ID NO: 330 - DNA, 2119 bp, Homo sapiens
ggggggacgcgagcgggatccaaacttccggtgcctgcagagctcggagcggcggaggcagagaccgaggctgcaccggcagaggctgcggggcggacgcgcgggccggcgcagccatggtgaagattagcttccagcccgccgtggctggcatcaagggcgacaaggctgacaaggcgtcggcgtcggcccctgcgccggcctcggccaccgagatcctgctgacgccggctagggaggagcagcccccacaacatcgatccaagagggggggctcagtgggcggcgtgtgctacctgtcgatgggcatggtcgtgctgctcatgggcctcgtgttcgcctctgtctacatctacagatacttcttccttgcgcagctggcccgagataacttcttccgctgtggtgtgctgtatgaggactccctgtcctcccaggtccggactcagatggagctggaagaggatgtgaaaatctacctcgacgagaactacgagcgcatcaacgtgcctgtgccccagtttggcggcggtgaccctgcagacatcatccatgacttccagcggggtctgactgcgtaccatgatatctccctggacaagtgctatgtcatcgaactcaacaccaccattgtgctgccccctcgcaacttctgggagctcctcatgaacgtgaagagggggacctacctgccgcagacgtacatcatccaggaggagatggtggtcacggagcatgtcagtgacaaggaggccctggggtccttcatctaccacctgtgcaacgggaaagacacctaccggctccggcgccgggcaacgcggaggcggatcaacaagcgtggggccaagaactgcaatgccatccgccacttcgagaacaccttcgtggtggagacgctcatctgcggggtggtgtgaggccctcctcccccagaaccccctgccgtgttcctcttttcttctttccggctgctctctggccctcctccttccccctgcttagcttgtactttggacgcgtttctatagaggtgacatgtctctccattcctctccaaccctgcccacctccctgtaccagagctgtgatctctcggtggggggcccatctctgctgacctgggtgtggcggagggagaggcgatgctgcaaagtgttttctgtgtcccactgtcttgaagctgggcctgccaaagcctgggcccacagctgcaccggcagcccaaggggaaggaccggttgggggagccgggcatgtgaggccctgggcaaggggatggggctgtgggggcggggcggcatgggcttcagaagtatctgcacaattagaaaagtcctcagaagctttttcttggagggtacactttcttcactgtccctattcctagacctggggcttgagctgaggatgggacgatgtgcccagggagggacccaccagagcacaagagaaggtggctacctgggggtgtcccagggactctgtcagtgccttcagcccaccagcaggagcttggagtttggggagtggggatgagtccgtcaagcacaactgttctctgagtggaaccaaagaagcaaggagctaggacccccagtcctgccccccaggagcacaagcagggtcccctcagtcaaggcagtgggatgggcggctgaggaacggggcaggcaaggtcactgctcagtcacgtccacgggggacgagccgtgggttctgctgagtaggtggagctcattgctttctccaagcttggaactgttttgaaagataacacagagggaaagggagagccacctggtacttgtccaccctgcctcctctgttctgaaattccatccccctcagcttaggggaatgcacctttttccctttccttctcacttttgcatgtttttactgatcattcgatatgctaaccgttctcagccctgagccttggagaggagggctgtaacgccttcagtcagtctctggggatgaaactcttaaatgctttgtatattttctcaattagatctcttttcagaagtgtctatagaacaataaaaatcttttacttctgaaaaaaaaaaaaaaaaaaaaaaaaaaaaaaaaaaaaaaaaaaaaaaaaaaa

SEQ ID NO: 331 - protein, 267 aa, Homo sapiens
MVKISFQPAVAGIKGDKADKASASAPAPASATEILLTPAREEQPPQHRSKRGGSVGGVCYLSMGMVVLLMGLVFASVYIYRYFFLAQLARDNFFRCGVLYEDSLSSQVRTQMELEEDVKIYLDENYERINVPVPQFGGGDPADIIHDFQRGLTAYHDISLDKCYVIELNTTIVLPPRNFWELLMNVKRGTYLPQTYIIQEEMVVTEHVSDKEALGSFIYHLCNGKDTYRLRRRATRRRINKRGAKNCNAIRHFENTFVVETLICGVV

SEQ ID NO: 332 - DNA, 919 bp, Homo sapiens
atggagtcccagagggagcacaacttcagggaccggttcatcgaaatccaacttaccgcccaaggtaccgtagcaggggacctcctcgcccacgacctgccccagcagttggagaggctgaagataaagaaaatcagcaagccaccagtggtccaaaccagccgtctgttcgccgtggataccggcgtccctacaattaccggcgtcgcccgcgtcctcctaacgctccttcacaagatggcaaagaggccaaggcaggtgaagcaccaactgagaaccctgctccacccacccagcagagcagtgctgagtaacaccaggctcctcaggcaccttcaccatcggcaggtgacctaaagaattaatgaccattcagaaataaagcaaaaagcaggccacaaccttaaccaacaccaaagaaacatccaagcaataaagtggaagactaaccaagatttggacattggaatgtttactgttattctttaagaaacagctacaaaaagaaaatgtcaacaaatttttccagcaagctgagaacctgggaattcctgcacggaagacaagagagtagcctctccagtttcagcaaccgctaggtttctattttttttcctggtttttactgttttggtaatatatatattgaaacaagaaatattaataccacatggggagaaccccaaccaaagaaatctgaaatatatagtaaatgcttttttttccgtttttgttcattttggatgctggtgctaaacctccaagtgtcatgatttaaaaaaaaaaaaaatttatgtccttcttatttatttctaggatgaggggaggataacatttttgctttcttatgtgactctctttgaaaatgtgcagtaagaaattcctcaaaaataaaatttttacccttcagaggaaaaaa

SEQ ID NO: 333 - protein, 372 aa, Homo sapiens
MSEAGEATTTTTTTLPQAPTEAAAAAPQDPAPKSPVGSGAPQAAAPAPAAHVAGNPGGDAAPAATGTAAAASLAAAAGSEDAEKKVLATKVLGTVKWFNVRNGYGFINRNDTKEDVFVHQTAIKKNNPRKYLRSVGDGETVEFDVVEGEKGAEAANVTGPDGVPVEGSRYAADRRRYRRGYYGRRRGPPRNYAGEEEEEGSGSSEGFDPPATDRQFSGARNQLRRPQYRPQYRQRRFPPYHVGQTFDRRSRVLPHPNRIQAGEIGEMKDGVPEGAQLQGPVHRNPTYRPRYRSRGPPRPRPAPAVGEAEDKENQQATSGPNQPSVRRGYRRPYNYRRRPRPPNAPSQDGKEAKAGEAPTENPAPPTQQSSAE

SEQ ID NO: 334 - DNA, 1476 bp, Homo sapiens
gttaaacccatccagagtaatggctgcggccttacccaggaccctgggggagttgcagctgtatagaatattacaaaaagccaatctactttcttattttgatgcctttatccaacaaggtggtgatgatgtccagcaactctgtgaagcaggagaagaggagtttttggaaatcatggcactcgtgggcatggctagcaagccccttcatgttagaaggctgcagaaggctttgagagactgggtcacaaaccctgggcttttcaatcagccactgacttcccttcctgtcagtagcatacccatctataaattaccagagggatcaccaacatggctgggaatatcctgcagtagttatgaaaggagtagcaatgcccgggaacctcatttaaaaatccccaaatgtgctgccaccacctgtgtgcagagcttgggacaggggaagtcagatgtggttgggagcctagcactgcagagtgttggtgagtccagactctggcaaggccaccatgccactgagagcgagcacagcctctccccagcagacctgggctcccccgcgtccccaaaggagagcagtgaggcgctggatgctgctgctgcgctctctgtggctgagtgtgtggagcggatggcccccacactgccaaaaagtgacttgaatgaagtgaaagagctgctaaaaaccaacaagaagttggccaaaatgattggtcacatctttgagatgaacgatgatgatccacacaaagaggaggaaattcggaaatacagtgcaatatatggcagatttgactcaaagaggaaggatgggaaacatctcacacttcatgagctcactgttaatgaagcggctgctcaactctgtgtgaaggataatgccctgctgacaagaagagatgagctttttgccttggctcgacagatttctcgagaagtcacctataaatatacttacagaaccaccaagtcaaaatgtggagaaagagatgaattatccccaaagagaattaaagtggagcagcagcctgaaaaggtgatggcaaagcagatggagttcctttgcaaccaagctggctatgagagactgcagcatgccgagaggaggttgtctgcagggctttacaggcagagctcagaagagcacagtcctaacggcttgacttccgataactcagatggacaaggagaaagacctttgaatctccgaatgcctaatttacagaacagacaaccccatcattttgtggtggatggggagctgagcagactttaccccagtgaggcaaagtcccactcatcagagagccttgggattttaaaagactaccctcattcagcttttaccttagaaaagaaagtcatcaaaacagagcctgaagattcaagatagctgtgatttctctcaccgttctctggaaatggcatcagatttaaggataatactccatcatagaaataagccttaataac

SEQ ID NO: 335 - protein, 458 aa, Homo sapiens
MAAALPRTLGELQLYRILQKANLLSYFDAFIQQGGDDVQQLCEAGEEEFLEIMALVGMASKPLHVRRLQKALRDWVTNPGLFNQPLTSLPVSSIPIYKLPEGSPTWLGISCSSYERSSNAREPHLKIPKCAATTCVQSLGQGKSDVVGSLALQSVGESRLWQGHHATESEHSLSPADLGSPASPKESSEALDAAAALSVAECVERMAPTLPKSDLNEVKELLKTNKKLAKMIGHIFEMNDDDPHKEEEIRKYSAIYGRFDSKRKDGKHLTLHELTVNEAAAQLCVKDNALLTRRDELFALARQISREVTYKYTYRTTKSKCGERDELSPKRIKVEQQPEKVMAKQMEFLCNQAGYERLQHAERRLSAGLYRQSSEEHSPNGLTSDNSDGQGERPLNLRMPNLQNRQPHHFVVDGELSRLYPSEAKSHSSESLGILKDYPHSAFTLEKKVIKTEPEDSR

SEQ ID NO: 336 - DNA, 564 bp, Homo sapiens
  misc_feature (370)..(370): n is a, c, g, or t
  misc_feature (426)..(426): n is a, c, g, or t
  misc_feature (458)..(458): n is a, c, g, or t
  misc_feature (471)..(471): n is a, c, g, or t
  misc_feature (483)..(484): n is a, c, g, or t
  misc_feature (510)..(510): n is a, c, g, or t
  misc_feature (519)..(519): n is a, c, g, or t
  misc_feature (535)..(535): n is a, c, g, or t
  misc_feature (538)..(538): n is a, c, g, or t
cagcctttaatgccttttattcataaaaactgtgaaagctagactgaaccattggaaacatttaactcagactctggattcagagtcgggaacccttagttctatctgaatccaagacagccacaccttagtatactgcccaaactaatgagtttaataaatacaaatactcgtttctttttgattagtgtgattagaactgaacaacggcacttaaggaatctggaagatagcctggatagatttctgattcatcccaagacctcaaagacaacacctgggtaccaaatttctttatttgaaggaatggtacaaatcaaagaacttaagtggatgttttgggtacaacttatagaaaaggtaaaggaanccccacatgcatgcactgccttggtgaccagggaagtcacccacggctatgggggnaattagcccgaggcttagctttccatatcacngtctcccagggtntgcttgtcaagnngttattccgccaagccagattcgggnggtcccatnttgggcaatttggtcncgnggtcccccattctttggatgggtttc

SEQ ID NO: 337 - protein, 190 aa, Homo sapiens
MTTASTSQVRQNYHQDSEAAINRQINLELYASYVYLSMSYYFDRDDVALKNFAKYFLHQSHEEREHAEKLMKLQNQRGGRIFLQDIKKPDCDDWESGLNAMECALHLEKNVNQSLLELHKLATDKNDPHLCDFIETHYLNEQVKAIKELGDHVTNLRKMGAPESGLAEYLFDKHTWETVIMKAKPRANFP

SEQ ID NO: 338 - DNA, 1470 bp, Homo sapiens
gaaactgcggacgggccaccggacgccttctggagcaggtagcagcatgcagccgcctccaagtctgtgcggacgcgccctggttgcgctggttcttgcctgcggcctgtcgcggatctggggagaggagagaggcttcccgcctgacagggccactccgcttttgcaaaccgcagagataatgacgccacccactaagaccttatggcccaagggttccaacgccagtctggcgcggtcgttggcacctgcggaggtgcctaaaggagacaggacggcaggatctccgccacgcaccatctcccctcccccgtgccaaggacccatcgagatcaaggagactttcaaatacatcaacacggttgtgtcctgccttgtgttcgtgctggggatcatcgggaactccacacttctgagaattatctacaagaacaagtgcatgcgaaacggtcccaatatcttgatcgccagcttggctctgggagacctgctgcacatcgtcattgacatccctatcaatgtctacaagctgctggcagaggactggccatttggagctgagatgtgtaagctggtgcctttcatacagaaagcctccgtgggaatcactgtgctgagtctatgtgctctgagtattgacagatatcgagctgttgcttcttggagtagaattaaaggaattggggttccaaaatggacagcagtagaaattgttttgatttgggtggtctctgtggttctggctgtccctgaagccataggttttgatataattacgatggactacaaaggaagttatctgcgaatctgcttgcttcatcccgttcagaagacagctttcatgcagttttacaagacagcaaaagattggtggctgttcagtttctatttctgcttgccattggccatcactgcatttttttatacactaatgacctgtgaaatgttgagaaagaaaagtggcatgcagattgctttaaatgatcacctaaagcagagacgggaagtggccaaaaccgtcttttgcctggtccttgtctttgccctctgctggcttccccttcacctcagcaggattctgaagctcactctttataatcagaatgatcccaatagatgtgaacttttgagctttctgttggtattggactatattggtatcaacatggcttcactgaattcctgcattaacccaattgctctgtatttggtgagcaaaagattcaaaaactgctttaagtcatgcttatgctgctggtgccagtcatttgaagaaaaacagtccttggaggaaaagcagtcgtgcttaaagttcaaagctaatgatcacggatatgacaacttccgttccagtaataaatacagctcatcttgaaagaagaactattcactgtatttcattttctttatattggaccgaagtcattaaaacaaaatgaaacatttgccaaaacaaaacaaaaaactatg

SEQ ID NO: 339 - protein, 442 aa, Homo sapiens
MQPPPSLCGRALVALVLACGLSRIWGEERGFPPDRATPLLQTAEIMTPPTKTLWPKGSNASLARSLAPAEVPKGDRTAGSPPRTISPPPCQGPIEIKETFKYINTVVSCLVFVLGIIGNSTLLRIIYKNKCMRNGPNILIASLALGDLLHIVIDIPINVYKLLAEDWPFGAEMCKLVPFIQKASVGITVLSLCALSIDRYRAVASWSRIKGIGVPKWTAVEIVLIWVVSVVLAVPEAIGFDIITMDYKGSYLRICLLHPVQKTAFMQFYKTAKDWWLFSFYFCLPLAITAFFYTLMTCEMLRKKSGMQIALNDHLKQRREVAKTVFCLVLVFALCWLPLHLSRILKLTLYNQNDPNRCELLSFLLVLDYIGINMASLNSCINPIALYLVSKRFKNCFKSCLCCWCQSFEEKQSLEEKQSCLKFKANDHGYDNFRSSNKYSSS

SEQ ID NO: 340 - DNA, 1448 bp, Homo sapiens
tcgacgctgtagtggcttcgtcttcggtttttctcttccttcgctaacgcctcccggctctcgtcagcctcccgccggccgtctccttaacaccgaacaccatgccttcaattaagttgcagagttctgatggagagatatttgaagttgatgtggaaattgccaaacaatctgtgactattaagaccatgttggaagatttgggaatggatgatgaaggagatgatgacccagttcctctaccaaatgtgaatgcagcaatattaaaaaaggtcattcagtggtgcacccaccacaaggatgaccctcctcctcctgaagatgatgagaacaaagaaaagcgaacagatgatatccctgtttgggaccaagaattcctgaaagttgaccaaggaacactttttgaactcattctggctgcaaactacttagacatcaaaggtttgcttgatgttacatgcaagactgttgccaatatgatcaaggggaaaactcctgaggagattcgcaagaccttcaatatcaaaaatgactttactgaagaggaggaagcccaggtacgcaaagagaaccagtggtgtgaagagaagtgaaatgttgtgcctgacactgtaacactgtaaggattgttccaaatactagttgcactgctctgtttataattgttaatattagacaaacagtagacaaatgcagcagcaagtcaattgtattagcagaatattgtcctcattgcatgtgtagttgtagctcgagtcccaaaccttacggccaagtttcttctagtatgatggaaagtttcttttttctttgctctgaataaaactgaactgtgggttctctataagtggcattttgggctttcctcccttttttgtaaagcaatgtctgcctagtttattgtccaagttaactttaggtgaccttttaaaagttggcattgaaaataaaacaacttgcaaaaaagttttctggaatagaattaacaaaatattatctttatcatgagttggaaactggaaaaaggcttcttgaagtaaatgttctgagtggagctactaggatgtcttccagcctcctgcagtcaaggagtaccactgtattgattagcctgtatgtagcagggctcccttcattgcatctgaggacttgttttctttttctttatttttaatcctcttagttttaaatatattgcctagagactcagttactacccagtttgtggttttttgggagaaatgtaactggacagttagcttttcaattaaaaagacacttaacccatgtgggatgtcatctttttataattagtgttcccatgtggagaaaattattcacactacttgcatgtaaagaataatttaacttttaacattaaaatatgtggtaaaacccagaaagcatccatcatgaatgcaagatactttcaataaagtaagttatat

SEQ ID NO: 341 - protein, 160 aa, Homo sapiens
MPSIKLQSSDGEIFEVDVEIAKQSVTIKTMLEDLGMDDEGDDDPVPLPNVNAAILKKVIQWCTHHKDDPPPPEDDENKEKRTDDIPVWDQEFLKVDQGTLFELILAANYLDIKGLLDVTCKTVANMIKGKTPEEIRKTFNIKNDFTEEEEAQVGSTQFCL

SEQ ID NO: 342 - DNA, 4103 bp, Homo sapiens
cccacgcgtccgcttagtgggtatctgatgtgtagccatgcagaagacctacgtgcaaaagcagaatgggaaggcaaagggacagcttcccgatctaaactattggataaacttcagacctatttaccaccatcagtgatgcttcccccacggcgtttacagactctcctgcggcaggcggtggaactacaaagggatcggtgcctatatcacaataccaaacttgataataatctagattctgtgtctctgcttatagaccatgtttgtagtaggaggcagttcccatgttatacgcagcagatacttacggagcattgtaatgaagtgtggttctgtaaattctctaatgatggcactaaactagcaacaggatcaaaagatacaacagttatcatatggcaagttgatccggatacacacctgctaaaactgcttaaaacattagaaggacatgcttatggcgtttcttatattgcatggagtccagatgacaactatcttgttgcttgtggcccagatgactgctctgagctttggctttggaatgtacaaacaggagaactaaggacaaaaatgagccagtctcatgaagacagtttgacaagtgtggcttggaatccagatgggaagcgctttgtgactggaggtcagcgtgggcagttctatcagtgtgacttagatggtaatctccttgactcctgggaaggggtaagagtgcaatgcctttggtgcttgagtgatggaaagactgttctggcatcagatacacaccagcgaattcggggctataacttcgaggaccttacagataggaacatagtacaagaagatcatcctattatgtcttttactatttcaaaaaatggccgattagctttgttaaatgtagcaactcagggagttcatttatgggacttgcaagacagagttttagtaagaaagtatcaaggtgttacacaagggttttatacaattcattcatgttttggaggccataatgaagacttcatcgctagtggcagtgaagatcacaaggtttacatctggcacaaacgtagtgaactgccaattgcggagctgacagggcacacacgtacagtaaactgtgtgagctggaacccacagattccatccatgatggccagcgcctcagatgatggcactgttagaatatggggaccagcaccttttatagaccaccagaatattgaagaggaatgcagtagcatggatagttgatggtgaatttggagcagacgacttctgtttaacttaaaattagtcgtattttaatggcttgggatttggtgcaaacaaacatgattgatagctggacagacatgctcgtcatgaaaaaagaaccatttctgaagcccgattggggccaaacatttacaccttgcttcatagtaaccagttgagatgaagcacgtcgttagaacgttgttggacaccatgttgaattattcccccatcggttgtgaagaactgtgctacattcaggcttacccattgaactcagtatatatttttttccttcctgtcttttgtctggcaggataccattcttgttgctcttctgtgtaatgaagtttaaatgcttgtttggaaaactttatttaacagtttagaaggcttgatagaaagagtgcattagtctgaagagtatacattggataggaaagaatttccttcttttgtttctccaaatctttccgccttatttagcttgagatctttgcagcttggttcatggattctagccttgcccgttgcgcagtatatactgatccagatgataaaccagtgaactatgtcaaaagcactctcaatattacatttgacaaaaagttttgtacttttcacatagcttgttgccccgtaaaagggttaacagcacaattttttaaaaataaattaagaagtatttataggattaaagtgacttcatttgtatacatttggaatctaaaccagcttaaaaacagtttcctcaatgacttagatacacagtataactgatgctcttctggaataccacatgagacatggtcagaaacagtgcttggaaggacattacacaagaaattcagagtaatgctttgaagatttccccccttttgttttattcctgaaggaacatcagtacccgatcttgaagaaattcaagattcaaaaagaattttaaatacaccaacatgagacatcagtagtcagttggttttcagtaaagcttgttccaagttgttctcaacttaggaagtaattttggtgtgatctagcaaaagagtaggaatcagcgatacaaccactttggaagtttatagtataattgaaattattagaagaattcagcaggttacagacatacttaaactgggattaaaacctcatagtcatttttcttaattgcccttaatattttgacatatagggatacataaatttaaagaatattttttctcagttttttcagatattgccatactgaacctcattctaaactggtgctgtggatagtctttccctctcccctcctgttttagtttaaggaaaggtttccttcatggaaaagcacttttaattttgagaatttcacatttaaaataagccaaaagcctgatgttcacattgtgcttttaaactccgtaacagctgaatacaacataacatagtctcccttgaaattccctccctttttcagtagaggataaatagggtgactccagctgttggaatgagaatggggatacccccaaaataagattctggtgaagaaaaagtcttgtactaagttcccctttaggtgtagccaagtctataatataattatgatcatgaatagactccagaatccacaaagagaagagggcttggatgtcaaaaattcttccattgttgggtaggtggtcggggatgggagaaagggaaaagtcagggaaggggagaagaaagaaaaacacatttggccttaaaatagcatgcattctcccagaagcccatagtaaagaaaatgacagatcgtggtcagcagactcttatcaaattggtatgtaaaagatttcttcaagctccattttgcagagaccaccacttagagaatcaaaaaattcctgttttgatacttctaagttaaaatatatgttacagtttatctggtacttcatttttcttaactaaaattactttttactttaagcttgaataaaaatcttcattggtaactgtatgtaattaagtggcaacttctctttacctcagtatagttaaaaaccattcatattttaagtgattcatgtataccctgaagccgttaatacaccccagtctctatggtaacatcactaaatgtgggcatagaaactccacagctgtttacaaatttggttacagtgtgctacggtgcatttgtaacactcagatttgtgcccattcaggggcaatttggcactcagattctactctacttcacctaaccacccctagatctgagttttcagagtgcttctgaagtacagtttaaaaacactttttaaaaagtggagtaaaagtgaggcacattttacaagaacataactcctattaaaacggagtaacaactatgcaaaggtttctatagcagctaggtgagtttgttttccgggtctgtcttaactggcagcttcctgtacatactggtacttatttgctgtaaacgtctgtttcatacatttgccatgcagtgactgtgctcgaaaggtgaaatcaatggtaaagaagcctaggattttatggtatgagaaactgatcgcaggattttctgatccatagctattaattgaaaacttctgatagtgctgtaggctctatagtaggcttaagagtgagtcttatactatgaagccagccacaagatactaacaaatgtataaattgaaaagtaccaatactttttgcacatagatcaaaatagagtggagaatttgggctccaaaaatcaggttagtaggctcatttccatgtgcttaaaaatgtttttgttgttatgcattgattaagggctagagcaaatataaaattaaatgtctttttcctccaaaaaaaaaaaaaaaaaaaaaaaa

SEQ ID NO: 343 - protein, 404 aa, Homo sapiens
MCSHAEDLRAKAEWEGKGTASRSKLLDKLQTYLPPSVMLPPRRLQTLLRQAVELQRDRCLYHNTKLDNNLDSVSLLIDHVCSRRQFPCYTQQILTEHCNEVWFCKFSNDGTKLATGSKDTTVIIWQVDPDTHLLKLLKTLEGHAYGVSYIAWSPDDNYLVACGPDDCSELWLWNVQTGELRTKMSQSHEDSLTSVAWNPDGKRFVTGGQRGQFYQCDLDGNLLDSWEGVRVQCLWCLSDGKTVLASDTHQRIRGYNFEDLTDRNIVQEDHPIMSFTISKNGRLALLNVATQGVHLWDLQDRVLVRKYQGVTQGFYTIHSCFGGHNEDFIASGSEDHKVYIWHKRSELPIAELTGHTRTVNCVSWNPQIPSMMASASDDGTVRIWGPAPFIDHQNIEEECSSMDS

SEQ ID NO: 344 - DNA, 820 bp, Homo sapiens
  misc_feature (572)..(572): n is a, c, g, or t
  misc_feature (687)..(687): n is a, c, g, or t
cacgcttaattcactttatttttcttgtataaaaaccctatgttgtagccacagctggagcctgagtccgctgcacggagactctggtgtgggtcttgacgaggtggtcagtgaactcctgatagggagacttggtgaatacagtctccttccagaggtcgggggtcaggtagctgtaggtcttagaaatggcatcaaaggtggccttgcgaagttgcccagggtggcagtgcagccccgggctgaggtgtagcagtcatcgataccagccatcatgagcagcttcttaggcacaggtgcggagacgatgccagtgcccctgggtgcagggatgaggcgtaccagcacagagccgcaggggcctgtcaacttgccaagggacattttggggcttgcggatcttgttcccccagtagcctctgcgcacggggacgatggagagcttggccaggatgatggccccacggatggcggtggcacctccttggagcacttaacacccagaccgacgtggccattgtagtccccgatagcaacaaatgccttgaacctggtgcgctggccggcacggntctgcttctgcactggcataatcttcaaaacctcatccttgagagaggcccccaggaagaaatcaatgatctctgattccttaatgggcagggagaagagatagatctcctccanggacttgatcttcatgtccttgaccaagcggcccagcttgtgacgggcatccactcttatcctgggccttgctccgcaactccgggcctgggcccggcccgtacacggcgcgaccccggcccgatgccatgcc

SEQ ID NO: 345 - protein, 293 aa, Homo sapiens [sequence omitted]

SEQ ID NO: 346 - DNA, 1072 bp, Homo sapiens
gataggatcaccacggtggtaacctctcacattgtcttctccacaggaggcgtctgacacagtatgatgatgaagatcccatggggcagcatcccagtactgatcttgctcctgctcctgggcctaatcgatatctcccaggcccagctcagctgcaccgggcccccagccatccctggcatcccgggtatccctgggacacctggccccgatggccaacctgggaccccagggataaaaggagagaaagggcttccagggctggctggagaccatggtgagttcggagagaagggagacccagggattcctgggaatccaggaaaagtcggccccaagggccccatgggccctaaaggtggcccaggggcccctggagccccaggccccaaaggtgaatcgggagactacaaggccacccagaaaatcgccttctctgccacaagaaccatcaacgtccccctgcgccgggaccagaccatccgcttcgaccacgtgatcaccaacatgaacaacaattatgagccccgcagtggcaagttcacctgcaaggtgcccggtctctactacttcacctaccacgccagctctcgagggaacctgtgcgtgaacctcatgcgtggccgggagcgtgcacagaaggtggtcaccttctgtgactatgcctacaacaccttccaggtcaccaccggtggcatggtcctcaagctggagcagggggagaacgtcttcctgcaggccaccgacaagaactcactactgggcatggagggtgccaacagcatcttttccgggttcctgctctttccagatatggaggcctgacctgtgggctgcttcacatccaccccggctccccctgccagcaacgctcactctacccccaacaccaccccttgcccagccaatggacacagtagggcttggtgaatgctgctgagtgaatgagtaaataaactcttcaaggccaaggaacagtggtctaattcaactctgtgtcccagcactggcacaccagaagtgccatgctcagaaatgttggttacatgaatgaatgaaccatgaatgaatg

SEQ ID NO: 347 - protein, 253 aa, Homo sapiens
MMMKIPWGSIPVLILLLLLGLIDISQAQLSCTGPPAIPGIPGIPGTPGPDGQPGTPGIKGEKGLPGLAGDHGEFGEKGDPGIPGNPGKVGPKGPMGPKGGPGAPGAPGPKGESGDYKATQKIAFSATRTINVPLRRDQTIRFDHVITNMNNNYEPRSGKFTCKVPGLYYFTYHASSRGNLCVNLMRGRERAQKVVTFCDYAYNTFQVTTGGMVLKLEQGENVFLQATDKNSLLGMEGANSIFSGFLLFPDMEA

SEQ ID NO: 348 - DNA, 727 bp, Homo sapiens
gaacgagggtcctagctgccgccacccgaacagcctgtcctggtgccccggctccctgccccgcgcccagtcatgaccctgcgcccctcactcctcccgctccatctgctgctgctgctgctgctcagtgcggcggtgtgccgggctgaggctgggctcgaaaccgaaagtcccgtccggaccctccaagtggagaccctggtggagcccccagaaccatgtgccgagcccgctgcttttggagacacgcttcacatacactacacgggaagcttggtagatggacgtattattgacacctccctgaccagagaccctctggttatagaacttggccaaaagcaggtgattccaggtctggagcagagtcttctcgacatgtgtgtgggagagaagcgaagggcaatcattccttctcacttggcctatggaaaacggggatttccaccatctgtcccagcggatgcagtggtgcagtatgacgtggagctgattgcactaatccgagccaactactggctaaagctggtgaagggcattttgcctctggtagggatggccatggtgccagccctcctgggcctcattgggtatcacctatacagaaaggccaatagacccaaagtctccaaaaagaagctcaaggaagagaaacgaaacaagagcaaaaagaaataataaataataaattttaaaaaacttaaaaaaaaaaaaaaaaaaaaaaaaa

SEQ ID NO: 349 - protein, 201 aa, Homo sapiens
MTLRPSLLPLHLLLLLLLSAAVCRAEAGLETESPVRTLQVETLVEPPEPCAEPAAFGDTLHIHYTGSLVDGRIIDTSLTRDPLVIELGQKQVIPGLEQSLLDMCVGEKRRAIIPSHLAYGKRGFPPSVPADAVVQYDVELIALIRANYWLKLVKGILPLVGMAMVPALLGLIGYHLYRKANRPKVSKKKLKEEKRNKSKKK

SEQ ID NO: 350 - DNA, 2697 bp, Homo sapiens
gtggccgcagcggcggtggcgacgacggccgagacgtggggatggcgggcgccgggagcgaagcccggttcgccgggctgtcgctggtgcagctcaacgagctgctggaggacgagggccagctgacggagatggtgcagaagatggaggagacacagaatgttcagcttaacaaagaaatgacacttgccagcaaccggagcctggcagaaggaaaccttttgtaccagccccagctggacacgttgaaagcacgcttgacccagaaataccaggaactccaggttctctttgaagcctatcagataaagaagaccaaattagacagacagtctagcagtgcttccttggagaccctgttagcacttcttcaggcagaaggggccaagattgaggaagacactgagaacatggcagagaagtttctggatggagaacttcctctggattccttcattgatgtctatcagagcaaacggaaactggcccacatgcgacgggtgaaaatcgagaagctccaggagatggtcctaaaggggcagagactcccacaggccctggccccgctgccccccaggctgcccgaactggcacctaccgccccccttccctaccctgccccagaggccagtgggcctcctgccgttgcacctcggcgcatcccccccccaccacccccggtgcctgcgggacgcttagccaccccgtttactgcggccatgagttcgggacaggccgtgccgtacccaggattacagtgcccgcccctgcccccccgcgtgggcctccccactcagcaaggattctcttcgcagttcgtgtccccatatccgccacctctccctcagagacccccgccccggctccctccacaccagccgggtttcatcctccagtgagcgccggcgcggtccttcccgggagacttcttccacctggcgtgttgtgctctgctcacgggaaggaggctggaggtccgctctgtgccaagggctctggggccctgggccagcgtgtctgtctgattttagaactgtaggtcagtggtgagtagtaggagcccaggctttgggcatcaaggcagttgtgtgtgccgggttacagcctgacacctgtgcgttgcatcggtttgcattatccgtgtgatttctaagtatcttagcgttgatgaactcatgtttgggaagaaataggcctctcccccagtcccatttagaatcgtggtccttctgttgcagctttatttaatgagcatggttcatgatacttattttattttcgaaagacagtcctatgtgtctcacccaccggccactgcagccctggtgagggcgggtgggcgccggccggcctggaagagcgccgtggctgggccaccacctgtggctgcgttgttgctcactgaatctgttggggagaggtcaccatagtcaccgcctgacctggctgctgctcttgcttcagagccacaagcaaagtttgcactgggcccactgccgagtccagaggccggagaacggccactggtgtgggaggggagcgcacgagtgggactttgcacagcaaattgtgtccccagctcctcctctcccgcctgcctggagccggccctgaaggtttctatgaagaaataatcccccaatatttttactacgtgtgtgattttcctgttttatattgaaaaaacttttttgacactcccaagaccattcagggaaattttataaaaaatgcagatactgtcttgagcagatcgaaatgccgatgaagtggatgcaatttccttttgtgcaagcagtgcacggtgcccccccctcgggtgtccgtgctgtgccttagcttccccaggtgccgggactcacacctgctaggggctgggcaaggccccggctctgctttctctgaagggcttgtccaagttcattgccctgttacaggtggtcaagacgtccggccgccttgacccaggctacccttagccaatatcctctgcccctgggtggctggtggctgggcctcagggtgggcaacgttaggggtttggcgaaagcccgccccatgggattgagggacggggctgcactccaaccgtctgcacctgctcttcccccacccctgtgggacctcatcttcacgtgccatgtgtgctgaaggcccagggcccagcagggggcagtggcacctgttgacggaaaaggccgaggtgcttaccagtggaccttctggcccgcccctcccctgtcacttgtcgggcatccagggccccgacctgtgcctagccgccagggtgacagaaggcagaactgaagcggggtctgggccacgggccaggccactgccttttgtcctcagtgaccatacattcctgctctcggacttgaactctactgtaactgttttcttgaaatgaagctgtacaggacgattcactgccatgccagtcaggcgggcttgccatgttctgtgaatctcgagtgagcggtgccacccgcccccatacctccgccaccggccgctgtcggggatgccacagcctgccacggtcgcagccagacgtgagcttggcattgaagttgcaaagcggcccctggccgggctcgccgtcgctgtccagggccgtgtccggtgctgtggctgtaaagctgtaggaccctttttaataaatagagaattattaataaaaaaaaaaaaaaaaaa

SEQ ID NO: 351 - protein, 285 aa, Homo sapiens
MAGAGSEARFAGLSLVQLNELLEDEGQLTEMVQKMEETQNVQLNKEMTLASNRSLAEGNLLYQPQLDTLKARLTQKYQELQVLFEAYQIKKTKLDRQSSSASLETLLALLQAEGAKIEEDTENMAEKFLDGELPLDSFIDVYQSKRKLAHMRRVKIEKLQEMVLKGQRLPQALAPLPPRLPELAPTAPLPYPAPEASGPPAVAPRRIPPPPPPVPAGRLATPFTAAMSSGQAVPYPGLQCPPLPPRVGLPTQQGFSSQFVSPYPPPLPQRPPPRLPPHQPGFILQ

SEQ ID NO: 352 - protein, 61 aa, Homo sapiens
MKRFLFLLLTISLLVMVQIQTGLSGQNDTSQTSSPSASSSMSGGIFLFFVANAIIHLFCFS

SEQ ID NO: 353 - DNA, 3988 bp, Homo sapiens
tgcaactccgagcgtgagtccaggctaaggggacgccggccggggaagaggcgcggcgggagaagcgaccgcagcgggagcccggccaccgagggctgccggcactaggcgcagagccgccagcgctcggaagcccgcggggtgcgggagcgggaacagacttcttttgtagaattatcctatggaatgatattttcataatgagtcaacaaggttacgtggctacacctccgtattctcagcctcagcctggaataggcctttctccacctcattatgggcactatggggatccgtcgcacacagcatctccaacaggtatgatgaagccagcagggcctttgggggccaccgccactaggggaatgttgcctccgggtcccccacctcctggaccccatcagtttggtcagaatggagctcatgccactggtcaccctccccaaagatttccaggccctccacctgtcaacaatgtggcatcctcacatgcaccataccaaccctctgcacaatcttcttatccaggtcctatatccacttcatctgtcacccagctgggcagccagctcagtgctatgcaaatcaacagctatggttcaggcatggctcctccaagccagggaccccctggccctctgtcagccacatcattgcagactcctccacgacctccacagccttccattttgcagcctggatctcaagttcttccaccaccacccaccacactcaatggtcctggtgcctcacctttgcctctaccaatgtacagaccagatgggctctctgggcctcctcctccaaatgcccagtaccagcccccacctcttccaggccagaccttgggtgctggatatcctccgcagcaggccaactctggtccccagatggcaggcgcacaactgtcttacccaggaggcttccctggaggtcctgcacagatggctggtccgccacagccccagaagaagctggatcctgactctatccctagcccaatccaggtgattgagaatgatagagccagcagaggaggacaagtttatgccaccaacaccagaggccagatccctcccctggtcactacagattgcatgatacaagaccaaggaaatgccagtcctcgattcatccgttgtacaacatactgttttccatgcacgtcagatatggctaagcaagctcagattccattagctgctgtcatcaagccctttgccaccattccttcaaatgagagtcccctttacttggtaaatcacggcgagagtggaccagtcagatgcaacaggtgcaaggcctacatgtgcccatttatgcagttcatcgaaggaggaaggagatatcagtgtggattttgcaactgtgtgaatgatgttccaccattctatttccaacatctggaccacattggaagaagactggaccactatgagaaaccagagttatctctaggatcttatgaatatgttgccactttggattattgcagaaagagtaagcctcccaacccaccagcctttatcttcatgattgatgtttcatatagtaacataaagaatggacttgtcaagctcatatgtgaagaactgaagaccatgctggaaaaaattccaaaggaagagcaagaagagacgtctgcaattcgagtgggttttatcacatataacaaagttctccatttctttaatgtgaagagtaatctggcccagcctcagatgatggtggtgactgatgttggagaagtctttgttcctttgttggatggtttccttgtcaactatcaagaatcccaatctgtgattcataatttgttggaccagattccagacatgtttgcagactctaatgaaaatgagactgtctttgcttctgtcatccaggctggcatggaagcactaaaggcagcagactgtcctgggaagctgttcatcttccattcttccttgccaactgctgaagcaccagggaagctcaaaaacagagatgacaaaaaactggttaatacagacaaagagaagatacttttccagccccaaacaaatgtctatgactcattggccaaggactgcgtggctcacggctgctctgtgacactcttcctctttcctagtcagtatgtggacgtggcctcgctggggctggttcctcagctcactggaggaaccctttacaaatacaacaatttccagatgcacttggatagacaacaatttttgaacgacctcagaaatgatattgaaaagaaaataggctttgatgctattatgagggttcgtaccagcacaggtttcagagccactgatttctttggtggaatcttgatgaacaacaccaccgatgtagaaatggctgccatcgattgtgacaaggcagtgaccgtggagttcaagcacgatgacaaactcagtgaagacagtggagccttaatccagtgtgctgtgctttacacgacaatcagtggtcaaagaagacttcggattcacaatcttggcttaaactgcagctctcagctagctgatctttataagagctgtgagacagatgctcttatcaacttctttgccaagtcagcttttaaagcagttctccaccagcctttgaaggtcatccgggaaattctagttaatcagactgcccatatgttggcatgttaccggaagaattgtgcaagtccttctgcagcaagccagcttattctaccagattccatgaaagtattgccagtgtacatgaattgcttgttgaaaaactgtgtactactcagcagaccagagatctcaactgatgaacgagcataccagagacagctggtcatgaccatgggtgtggctgactctcagcttttcttctacccacaacttctgcccatacacacgttagatgtcaagagtacaatgttacctgctgccgttcgttgctctgagtcccgtctttcagaagaaggaatattcttactggctaatggtctacacatgttcctgtggttgggagtaagcagcccaccagaactgatccaaggaatatttaatgtgccatcttttgcacatatcaacacagatatgacattgctgcctgaagtgggaaacccatactctcaacaactcagaatgataatgggtattatccaacaaaagaggccatattcaatgaagctcacaattgtaaagcagcgagaacaaccagaaatggttttccgacagttcctggtagaagacaaaggactttacggaggctcttcttatgtggatttcctttgttgtgttcacaaggagatctgtcagctgcttaattaattgaaacttctctgtcattgatgttgcatttccaaggagataatctccttcttggtgcctaattttctagatgataataggctagttttgatttcttgctcattttcagaataactttccaggaagagatggcatttagaacttcagctttggtgctcaggtataaagccaattaaggtacaattgtaccataaagggaacaatctgtttctgattgcacagtttctaatttttaaaactgatgtggtttgcatttcataaaaggcaaagtttacagaaccataaacattctcaattttctttatgctagacatataaattatttttcaaactgtatagatttggggtaaaaagttgtctcagttcctctcccaattgcaatgagaaaaaaaagcttaatttttacattatacttaattttctaaaaccatgtaactccattgaacatttttcaacttaaggtctgcatagcagacttttaataaccttgggatttatctggtagaacaatatgtgttctacatttttttcataattatatattgtgtatgttaaaactattttccagttgttttgtctgtaaaactgtctttatcaatatgcttaatggttctttgtacaattttgaaagtttctacctgtatataatggatgttaaccagtatcaataaatcacttcgtataatctt

SEQ ID NO: 354 - protein, 1032 aa, Homo sapiens
MSQQGYVATPPYSQPQPGIGLSPPHYGHYGDPSHTASPTGMMKPAGPLGATATRGMLPPGPPPPGPHQFGQNGAHATGHPPQRFPGPPPVNNVASSHAPYQPSAQSSYPGPISTSSVTQLGSQLSAMQINSYGSGMAPPSQGPPGPLSATSLQTPPRPPQPSILQPGSQVLPPPPTTLNGPGASPLPLPMYRPDGLSGPPPPNAQYQPPPLPGQTLGAGYPPQQANSGPQMAGAQLSYPGGFPGGPAQMAGPPQPQKKLDPDSIPSPIQVIENDRASRGGQVYATNTRGQIPPLVTTDCMIQDQGNASPRFIRCTTYCFPCTSDMAKQAQIPLAAVIKPFATIPSNESPLYLVNHGESGPVRCNRCKAYMCPFMQFIEGGRRYQCGFCNCVNDVPPFYFQHLDHIGRRLDHYEKPELSLGSYEYVATLDYCRKSKPPNPPAFIFMIDVSYSNIKNGLVKLICEELKTMLEKIPKEEQEETSAIRVGFITYNKVLHFFNVKSNLAQPQMMVVTDVGEVFVPLLDGFLVNYQESQSVIHNLLDQIPDMFADSNENETVFASVIQAGMEALKAADCPGKLFIFHSSLPTAEAPGKLKNRDDKKLVNTDKEKILFQPQTNVYDSLAKDCVAHGCSVTLFLFPSQYVDVASLGLVPQLTGGTLYKYNNFQMHLDRQQFLNDLRNDIEKKIGFDAIMRVRTSTGFRATDFFGGILMNNTTDVEMAAIDCDKAVTVEFKHDDKLSEDSGALIQCAVLYTTISGQRRLRIHNLGLNCSSQLADLYKSCETDALINFFAKSAFKAVLHQPLKVIREILVNQTAHMLACYRKNCASPSAASQLILPDSMKVLPVYMNCLLKNCVLLSRPEISTDERAYQRQLVMTMGVADSQLFFYPQLLPIHTLDVKSTMLPAAVRCSESRLSEEGIFLLANGLHMFLWLGVSSPPELIQGIFNVPSFAHINTDMTLLPEVGNPYSQQLRMIMGIIQQKRPYSMKLTIVKQREQPEMVFRQFLVEDKGLYGGSSYVDFLCCVHKEICQLLN

SEQ ID NO: 355 - DNA, 601 bp, Homo sapiens
tttttaacatttgatatttttattgatttttaaatttaaaatccagttttaaccacaaaattgtttgaatcacaagtggtaatacaatgtcttcaatatttttctaaagttatttttctatataataataagacaacagcatagcatataggaagttttcattccagtggcttttttatatatttatccttcttaggaaggacaaattaaattttttaaattaaacttttaaaatataacaacatctaacagaactgtacaaaacaaagagacattttttaaacaacttgccaaacttacttatgagtgtgttttaaaaacaactttgtaaatgtctgggcaaagaagcaagctgtcgtcctccctttaccttcatagtgagtttgtaaggctttgtctttgtaagcagaaagagtagactgtgttgttttttgccaaaaactgtttatacttaatctcactgaagtattgctatatggagaacccatactctgatcaacttgattttttgtgtgtaatgcttgatctaccaggtaacttcccaactgctcctaatgctagcgggctaatcccacattattattccactatcatccctgca

SEQ ID NO: 356 - protein, 1009 aa, Homo sapiens
MSWMFKRDPVWKYLQTVQYGVHGNFPRLSYPTFFPRFEFQDVIPPDDFLTSDEEVDSVLFGSLRGHVVGLRYYTGVVNNNEMVALQRDPNNPYDKNAIKVNNVNGNQVGHLKKELAGALAYIMDNKLAQIEGVVPFGANNAFTMPLHMTFWGKEENRKAVSDQLKKHGFKLGPAPKTLGFNLESGWGSGRAGPSYSMPVHAAVQMTTEQLKTEFDKLFEDLKEDDKTHEMEPAEAIETPLLPHQKQALAWMVSRENSKELPPFWEQRNDLYYNTITNFSEKDRPENVHGGILADDMGLGKTLTAIAVILTNFHDGRPLPIERVKKNLLKKEYNVNDDSMKLGGNNTSEKADGLSKDASRCSEQPSISDIKEKSKFRMSELSSSRPKRRKTAVQYIESSDSEEIETSELPQKMKGKLKNVQSETKGRAKAGSSKVIEDVAFACALTSSVPTTKKKMLKKGACAVEGSKKTDVEERPRTTLIICPLSVLSNWIDQFGQHIKSDVHLNFYVYYGPDRIREPALLSKQDIVLTTYNILTHDYGTKGDSPLHSIRWLRVILDEGHAIRNPNAQQTKAVLDLESERRWVLTGTPIQNSLKDLWSLLSFLKLKPFIDREWWHRTIQRPVTMGDEGGLRRLQSLIKNITLRRTKTSKIKGKPVLELPERKVFIQHITLSDEERKIYQSVKNEGRATIGRYFNEGTVLAHYADVLGLLLRLRQICCHTYLLTNAVSSNGPSGNDTPEELRKKLIRKMKLILSSGSDEECAICLDSLTVPVITHCAHVFCKPCICQVIQNEQPHAKCPLCRNDIHEDNLLECPPEELARDSEKKSDMEWTSSSKINALMHALTDLRKKNPNIKSLVVSQFTTFLSLIEIPLKASGFVFTRLDGSMAQKKRVESIQCFQNTEAGSPTIMLLSLKAGGVGLNLSAASRVFLMDPAWNPAAEDQCFDRCHRLGQKQEVIITKFIVKDSVEENMLKIQNKKRELAAGAFGTKKPNADEMKQAKINEIRTLIDL

SEQ ID NO: 357 - DNA, 1093 bp, Homo sapiens
ggctctcttcctgtctttgtggctccggaaaggcgtttgggatgccaacgatgaggctgctgtcatttgtggtgttggctctatttgctgtcactcaagcagaggaaggagccaggcttttggcttccaaatcactgctgaacagatacgccgtggagggacgagacctgaccttgcagtacaacatctacaatgttggctcaagtgctgcattagacgtggaactatctgatgattccttccctccagaagactttggcattgtgtctggaatgctcaatgtcaaatgggaccggattgcccctgctagcaatgtctcccacactgtggtcctgcgccctctcaaggctggttatttcaacttcacctcggcaacaattacttacctggcccaggaggatgggcccgttgtgattggctctaccagtgcacctggacagggaggaatcctggctcagcgggagtttgacaggcgattctcccctcattttctggactgggcagcctttggggtcatgacccttccctccatcggcatccccctgctattgtggtactccagcaagaggaaatatgacactcccaaaacgaagaagaactgattggggcttccacagccctcctctcccaagaaatccaggctcctctcccaagaaatccaggtgctttccagactccaaagggtatcttaaatgcaatctcttctctcttagcccttggccactttctcctggatcctgccctgctctcagccatagtgaaggaccagccctaggagtctgcgagagcctccttggttccatcgtgaagccataaacaggaatgcctttggcaatagccttgagcctagagggccctctgatgccccactgaggtgctgttggtttattgctggcaacgtgaattctctcaggggtctaggaggggcattttggagactgcctgacaccacccctatcccctgcctccccctctcagaagagggtggaagatgaaatgaaagctatgggactcttggaggatacccagtgtctattctgggttagagaagtgcttactaaggggttttctaataaaaacaaatgccaattgc

SEQ ID NO: 358 - protein, 183 aa, Homo sapiens
MRLLSFVVLALFAVTQAEEGARLLASKSLLNRYAVEGRDLTLQYNIYNVGSSAALDVELSDDSFPPEDFGIVSGMLNVKWDRIAPASNVSHTVVLRPLKAGYFNFTSATITYLAQEDGPVVIGSTSAPGQGGILAQREFDRRFSPHFLDWAAFGVMTLPSIGIPLLLWYSSKRKYDTPKTKKN

SEQ ID NO: 359 - DNA, 3512 bp, Homo sapiens
gacatggcgagtgtagtgctgccgagcggatcccagtgtgcggcggcagcggcggcggcggcgcctcccgggctccggctccggcttctgctgttgctcttctccgccgcggcactgatccccacaggtgatgggcagaatctgtttacgaaagacgtgacagtgatcgagggagaggttgcgaccatcagttgccaagtcaataagagtgacgactctgtgattcagctactgaatcccaacaggcagaccatttatttcagggacttcaggcctttgaaggacagcaggtttcagttgctgaatttttctagcagtgaactcaaagtatcattgacaaacgtctcaatttctgatgaaggaagatacttttgccagctctataccgatcccccacaggaaagttacaccaccatcacagtcctggtcccaccacgtaatctgatgatcgatatccagagagacactgcggtggaaggtgaggagattgaagtcaactgcactgctatggccagcaagccagccacgactatcaggtggttcaaagggaacacagagctaaaaggcaaatcggaggtggaagagtggtcagacatgtacactgtgaccagtcagctgatgctgaaggtgcacaaggaggacgatggggtcccagtgatctgccaggtggagcaccctgcggtcactggaaacctgcagacccagcggtatctagaagtacagtataagccacaagtgcacattcagatgacttatcctctacaaggcttaacccgggaaggggacgcgcttgagttaacatgtgaagccatcgggaagccccagcctgtgatggtaacttgggtgagagtcgatgatgaaatgcctcaacacgccgtactgtctgggcccaacctgttcatcaataacctaaacaaaacagataatggtacataccgctgtgaagcttcaaacatagtggggaaagctcactcggattatatgctgtatgtatacgatccccccacaactatccctcctcccacaacaaccaccaccaccaccaccaccaccaccaccaccatccttaccatcatcacagattcccgagcaggtgaagaaggctcgatcagggcagtggatcatgccgtgatcggtggcgtcgtggcggtggtggtgttcgccatgctgtgcttgctcatcattctggggcgctattttgccagacataaaggtacatacttcactcatgaagccaaaggagccgatgacgcagcagacgcagacacagctataatcaatgcagaaggaggacagaacaactccgaagaaaagaaagagtacttcatctagatcagcctttttgtttcaatgaggtgtccaactggccctatttagatgataaagagacagtgatattggaacttgcgagaaattcgtgtgtttttttatgaatgggtggaaaggtgtgagactgggaaggcttgggatttgctgtgtaaaaaaaaaaaaaaatgttctttggaaagtacactctgctgtttgacacctcttttttcgtttgtttgtttgtttaatttttatttcttcctaccaagtcaaacttggatacttggatttagtttcagtagattgcagaaaattctgtgccttgttttttgtttgtttgttgcgttcctttcttttccccctttgtgcacatttatttcctccctctaccccaatttcggattttttccaaaatctcccattttggaatttgcctgctgggattccttagactcttttccttcccttttctgttctagttttttacttttgtttatttttatggtaactgctttctgttccaaattcagtttcataaaaggagaaccagcacagcttaggatttcatagttcagaatttagtgtatccataatgcattcttctctgttgtcgtaaagatttgggtgaacaaacaatgaaaactctttgctgctgcccatgtttcaaatacttagagcagtgaagactagaaaattagactgtgattcagaaaatgttctgtttgctgtggaactacattactgtacagggttatctgcaagtgaggtgtgtcacaatgagattgaatttcactgtctttaattctgtatctgtagacggctcagtatagataccctacgctgtccagaaaggtttggggcagaaaggactcctcctttttccatgccctaaacagacctgacaggtgaggtctgttccttttatataagtggacaaattttgagttgccacaggaggggaagtagggaggggggaaatacagttctgctctggttgtttctgttccaaatgattccatccacctttcccaatcggccttacttctcactaatttgtaggaaaaagcaagttcgtctgttgtgcgaatgactgaatgggacagagttgattttttttttttttttcctttgtgcttagttaggaaggcagtaggatgtggcctgcatgtactgtatattacagatatttgtcatgctgggatttccaactcgaatctgtgtgaaactttcattccttcagatttggcttgacaaaggcaggaggtacaaaagaagggctggtattgttctcacactggtctgctgtcgctctcagttctcgataggtcagagcagaggtggaaaaacagcatgtacggattttcagttacttaatcaaaactcaaatgtgagtgtttttatctttttacctttcatacactagccttggcctctttcctcagccttaagaaccatctgccaaaaattactgatcctcgcatgatggcagccatagtgcatagctactaaaatcagtgaccttgaacatatcttagatggggagcctcgggaaaaggtagaggagtcacgttaccatttacatgttttaaagaaagaagtgtggggattttcactgaaacgtctaggaaatctagaagtagtcctgaaggacagaaactaaactcttaccatatgtttggtaagactccagactccagctaacagtccctatggaaagatggcatcaaaaaagatagatctatatatatatataaatatatattctattacattttcagtgagtaattttggattttgcaaggtgcatttttactattgttacattatgtggaaaacttatgctgatttatttaagggggaaaaagtgtcaactctttgttatttgaaaacatgtttatttttcttgtctttattttaacctttgatagaaccattgcaatatgggggccttttgggaacggactggtatgtaaaagaaaatccattatcgagcagcattttatttacccctcccctatccctaggcacttaaccaagacaaaaagccacaatgaacatccctttttcaatgaattttataatctgcagctctattccgagcccttagcacccattccgaccatagtataatcatatcaaagggtgagaatcatttagcatgttgttgaaaggttttttttcagttgttctttttagaaaaaaag

SEQ ID NO: 360 - protein, 442 aa, Homo sapiens
MASVVLPSGSQCAAAAAAAAPPGLRLRLLLLLFSAAALIPTGDGQNLFTKDVTVIEGEVATISCQVNKSDDSVIQLLNPNRQTIYFRDFRPLKDSRFQLLNFSSSELKVSLTNVSISDEGRYFCQLYTDPPQESYTTITVLVPPRNLMIDIQRDTAVEGEEIEVNCTAMASKPATTIRWFKGNTELKGKSEVEEWSDMYTVTSQLMLKVHKEDDGVPVICQVEHPAVTGNLQTQRYLEVQYKPQVHIQMTYPLQGLTREGDALELTCEAIGKPQPVMVTWVRVDDEMPQHAVLSGPNLFINNLNKTDNGTYRCEASNIVGKAHSDYMLYVYDPPTTIPPPTTTTTTTTTTTTTILTIITDSRAGEEGSIRAVDHAVIGGVVAVVVFAMLCLLIILGRYFARHKGTYFTHEAKGADDAADADTAIINAEGGQNNSEEKKEYFI

SEQ ID NO: 361 - DNA, 895 bp, Homo sapiens
  misc_feature (47)..(47): n is a, c, g, or t
  misc_feature (271)..(271): n is a, c, g, or t
  misc_feature (290)..(290): n is a, c, g, or t
  misc_feature (333)..(333): n is a, c, g, or t
  misc_feature (359)..(359): n is a, c, g, or t
  misc_feature (466)..(467): n is a, c, g, or t
  misc_feature (582)..(582): n is a, c, g, or t
  misc_feature (655)..(655): n is a, c, g, or t
  misc_feature (669)..(669): n is a, c, g, or t
  misc_feature (895)..(895): n is a, c, g, or t
gaggaagaatcatgatacacgttggattaagtatcttggactggttntaaacagtgctttgtaccggatctgctgaagcatctgtccagctggtatcctgtgaaagtttgttattttctgagtagacattcttatagagtattgtctttaaaatcagattgtctcttctatattgaaagcatttttatgttttctaatttaaaaattaatattttcttatagatattgtgcaataaagctgaagtagaatgtgtggttcttgcaaatgctntaacagctgataaaaattntacatttgtaaaattaatatattgtactggtacaaaatagttntaaattatatcttaaaaagcttacanaaaaaaaaaaaaaactcgagggggggcccggtacccaattcgccctatagtgagtcgtattacaattcactgggccgtcgtttacaacgtcgtgactgggaaaaccnnctgcgtacccaacttgaatcgcttgcagcacatgcgccttttcgcagctggcgtatagcgaagaggcccgtaccgatcgcctttccaaacagtgcgcacctgaatgcgaatgcanattgtagcgttatattttgtaaaatcccgtaaatcttgtaaatcactcattttgaccaatagccgaatcgcanaatcctataatcanagatgaccagataggttgaatgtgtccactggaccaggtcactataagacgtgactcacttaaagcggcttaagactaatcgaccctaaggaccccattaacttgcgggaagcgcaacgtgcagacgaggagaactacgtacgcctaggcctgaagttacgtaacttccttacacaaaccctcgtaagtctttaggtctaagggccttctggaattcctaactctn

SEQ ID NO: 362 - protein, 832 aa, Homo sapiens
MSEAGGAGPGGCGAGAGAGAGPGALPPQPAALPPAPPQGSPCAAAAGGSGACGPATAVAAAGTAEGPGGGGSARIAVKKAQLRSAPRAKKLEKLGVYSACKAEESCKCNGWKNPNPSPTPPRADLQQIIVSLTESCRSCSHALAAHVSHLENVSEEEMNRLLGIVLDVEYLFTCVHKEEDADTKQVYFYLFKLLRKSILQRGKPVVEGSLEKKPPFEKPSIEQGVNNFVQYKFSHLPAKERQTIVELAKMFLNRINYWHLEAPSQRRLRSPNDDISGYKENYTRWLCYCNVPQFCDSLPRYETTQVFGRTLLRSVFTVMRRQLLEQARQEKDKLPLEKRTLILTHFPKFLSMLEEEVYSQNSPIWDQDFLSASSRTSQLGIQTVINPPPVAGTISYNSTSSSLEQPNAGSSSPACKASSGLEANPGEKRKMTDSHVLEEAKKPRVMGDIPMELINEVMSTITDPAAMLGPETNFLSAHSARDEAARLEERRGVIEFHVVGNSLNQKPNKKILMWLVGLQNVFSHQLPRMPKEYITRLVFDPKHKTLALIKDGRVIGGICFRMFPSQGFTEIVFCAVTSNEQVKGYGTHLMNHLKEYHIKHDILNFLTYADEYAIGYFKKQGFSKEIKIPKTKYVGYIKDYEGATLMGCELNPRIPYTEFSVIIKKQKEIIKKLIERKQAQIRKVYPGLSCFKDGVRQIPIESIPGIRETGWKPSGKEKSKEPRDPDQLYSTLKSILQQVKSHQSAWPFMEPVKRTEAPGYYEVIRFPMDLKTMSERLKNRYYVSKKLFMADLQRVFTNCKEYNPPESEYYKCANILEKFFFSKIKEAGLIDK

SEQ ID NO: 363 - DNA, 949 bp, Homo sapiens
ttgtgctctaaagtgcttatggggcaggttccctaacagtcaggattccggttgcagtttttctcccccgccccaaagatacgtggttgcagacggagaaatggaggccagagacaaacaagtactccgctcacttcgcctggagctgggtgcagaggtattggtggagggactggttcttcagtacctctaccaggaaggaatcttgacggaaaaccatattcaagaaatcaatgctcaaaccacaggcctccggaaaacaatgctcctgctggatatcctaccttccaggggccctaaagcatttgatacattcctagattccctacaggagtttccctgggtcagggagaagctgaagaaggcaagggaagaggccatgaccgacctgcctgcaggtgacagattgactgggatcccctcgcacatcctcaacagctccccatcagaccggcagattaaccagctggcccagaggctgggccctgagtgggagcccatggtgctgtctctgggactgtcccagacggatatctaccgctgtaaggccaaccacccccacaacgtgcagtcgcaggtggtggaggccttcatccgttggcggcagcgcttcgggaagcaggccaccttccagagcctgcacaacgggctgcgggctgtggaggtggacccctcgctgctcctgcacatgttggagtgatggtgcctccagcaaccgctggggagtgtgtccctgagtcatgtgggcttgaatcctgactttcactcagagcaggtggttttttgtgtaggtttgttttttatttttgatgatcttcagatggaaggagaaaacagggtttccactagacattacttgaaaggccagattactcagcagatctcccatgttggctcaacaattctttgtttttaattgcttgaagattgcattgttgtaattgttcag

SEQ ID NO: 364 - protein, 199 aa, Homo sapiens
MEARDKQVLRSLRLELGAEVLVEGLVLQYLYQEGILTENHIQEINAQTTGLRKTMLLLDILPSRGPKAFDTFLDSLQEFPWVREKLKKAREEAMTDLPAGDRLTGIPSHILNSSPSDRQINQLAQRLGPEWEPMVLSLGLSQTDIYRCKANHPHNVQSQVVEAFIRWRQRFGKQATFQSLHNGLRAVEVDPSLLLHMLE

SEQ ID NO: 365 - DNA, 2104 bp, Homo sapiens
gctgttgtcgctcgctcagcgtctccctctcggccgccctctcctcgggacgatggcgcgcggtggccgcggccgccgcctggggttagccctggggctgctgctggcgctggtgctggcgccgcgggttctgcgggccaagcccacggtgcgcaaagagcgcgtggtgcggcccgactcggagctgggcgagcggccccctgaggacaaccagagcttccagtacgaccacgaggccttcctgggcaaggaggactccaagaccttcgaccagctcaccccggacgagagcaaggagaggctagggaagattgttgatcgaatcgacaatgatggggatggctttgtcactactgaggagctgaaaacctggatcaaacgggtgcagaaaagatacatctttgataatgtcgccaaagtctggaaggattatgatagggacaaggatgataaaatttcctgggaagaatacaaacaagccacctatggttactacctaggaaaccccgcagagtttcatgattcttcagatcatcacacctttaaaaagatgctgccacgtgatgagagaagattcaaagctgcagacctcaatggtgacctgacagctactcgggaggagttcactgcctttctgcatcctgaagagtttgaacatatgaaggaaattgtggttttggaaaccctggaggacatcgacaagaacggggatgggtttgtggatcaggatgagtatattgcggatatgttttcccatgaggagaatggccctgagccagactgggttttatcagaacgggagcagtttaacgaattccgggatctgaacaaggacgggaagttagacaaagatgagattcgccactggatcctccctcaagattatgatcacgcacaggctgaggccaggcatctggtatatgaatcagacaaaaacaaggatgagaagctaactaaagaggaaatattggagaactggaacatgtttgttggaagccaagctaccaattacggggaagatctcacaaaaaatcatgatgagctttgatagacactcaccagaatatggcagactgtcataggcattctgttattgtcttggattgttgctacaattgtctaattacagcagttgtgatcccacaaaaagcaagtttatacctcagattggggtataaaaattgtttttcgctcagtatttactggaaaatggacatcactagtctttcagtaagatttctctcaaaacacgtgaaaaccttggtaaattgcaattctttctggggatatattggtacaacatgacttaaaacttttttttttctattaaaacttaaaggggaacaaaacttgaaaaagccctgttcttcagaaggtgagtgggttgagggaggcagtaatatgaagtgactgctgtgtattttaactaccagatttttatatttgccactgttagatagttggaaaggggaaattctgtttaagcgaaagtggtatcatcctaggtaagcttatttcagaacaagtctaatatatcagattctttcttttcgactttatactctgagttattacttactgtaagtggtgtatatgaaacctccatgcattttccagtatggatctgctaatatgcacagtaaatccatgtctttgtttgtttttctattaagaagcaatcaagaaagataatgtgaaaaagaaaggaatttagaggtagggaaaagatgaatgtcagacatgtgaagaactatagtaaaaatgataaaccacctaaatatccttgaacctaccttaaaatgccaatgaggtaggcctgatctttgaatagtggctaggatacaatgcatttcctcagtgatcactgattagaatgagttggtgggatccttgggaagccaaacggagcggggttctggatcatgtcccatccagtccagtgaatccccgacccgcagacctgccccccccgcaacagcttataccatggaatgaggacaaggtgatactctgagctgtggactgaactggcagacacaacctgtacagattgaaatttcaccttgtaaggaggaagtgaatgaaataaaggatccccctaagg

SEQ ID NO: 366 - protein, 331 aa, Homo sapiens
MARGGRGRRLGLALGLLLALVLAPRVLRAKPTVRKERVVRPDSELGERPPEDNQSFQYDHEAFLGKEDSKTFDQLTPDESKERLGKIVDRIDNDGDGFVTTEELKTWIKRVQKRYIFDNVAKVWKDYDRDKDDKISWEEYKQATYGYYLGNPAEFHDSSDHHTFKKMLPRDERRFKAADLNGDLTATREEFTAFLHPEEFEHMKEIVVLETLEDIDKNGDGFVDQDEYIADMFSHEENGPEPDWVLSEREQFNEFRDLNKDGKLDKDEIRHWILPQDYDHAQAEARHLVYESDKNKDEKLTKEEILENWNMFVGSQATNYGEDLTKNHDEL

SEQ ID NO: 367 - DNA, 2218 bp, Homo sapiens
cccgggacatgaggaaaggaacaagggaaagagccggtgaaggggcagaacaggcaggtgagagtctaagagggctcagtaatctgaagcttggtgggaagaagggattctgggctagaaagggtgcagaagcctgaagtagaaagagacgggattttggtccggggtggagagcgaatgcattgaaaagggccaaggcccaggataaggtagacatttaaaggggtacggatgcccaaggtagagcagacacttgaggagaccagctcagcaaacggaagacacttaaagtggtaggttctcaagagagaagaagtttttaagactagagctaagcaagacatttaaaaggacatgggttgggatttgggaacacgtttattccagaggcaggaacaaaggagtcgcttgtcaaggatctggttagagaagactagggtcttcctcgaaggaagcacgcgcacgcctgctctcccccattgtcttttctggcttctccaggttccctcgacccaggaccccctgttcccaggctatggcccccagtgccctgtagacctggcaggccccccgtgcttgcgacccctatttgggggtctgggtggctactggagggccttgcagaggggcagagaaggcaggaccatgacatctagggcctctgaactttctccggggcgcagcgtgacggctggcatcatcattgttggagatgagatccttaagggacacactcaggacaccaacaccttctttctgtgccggacactgcgctccctaggggtccaggtttgccgagtctcagttgtacctgatgaggtagccaccattgcagctgaggtcacttctttctccaaccgcttcacccatgtcctcacagcagggggcatcggccccactcatgatgatgtgacctttgaggcagtggcacaggcctttggagatgagctgaagccacaccccaagttggaagcagccaccaaagccctaggaggggaaggctgggagaagctatcattggtgccctcctctgcccgcctgcattatggcacagatccttgcactggtcaacctttcagattccctctggtctccgtccgaaacgtctacctcttcccaggcattccagagctgctgcggcgggtgctggaggggatgaagggactattccaaaacccagctgttcagttccactcaaaggagctatatgtggctgctgatgaagcctccatcgcccccattctggctgaggcccaggcccactttggacgtaggcttggcctgggttcctaccctgactggggcagcaactactatcaggtgaagctgactctagactcagaggaagaaggacccctggaggaatgcttggcctacctgactgcccgtttgccccagggatcgctggtcccctacatgcccaacgctgtggagcaggccagtgaggctgtatacaaactcgctgaatcagggtcttctttggggaaaaaggtggcaggtgccctacagaccattgagacctccctggctcagtacagcctcacccagctctgtgtgggcttcaacgggggcaaagactgcactgccctcctgcacctcttccatgcagctgtgcagaggaaattacctgatgttccaaaccccctccagatcctgtatatccgcagcatctcccctttccctgagctggaacagtttctacaggacactatcaagaggtataatctgcagatgttggaagctgagggcagcatgaagcaggccctgggtgaactgcaggcacggcacccccagctggaggctgtccttatgggcacccgccggactgacccctactcctgtagcctctgccctttcagccccactgacccaggctggcccgcattcatgcgcatcaacccactgctggactggacctacagagacatctgggattttctgcgtcagctgtttgtcccatactgtatcctgtatgaccgaggatacacatcactggggagtcgggagaataccgtgcggaacccggccctgaagtgcctgagcccaggaggacaccccacataccgtccagcctatctactggagaacgaagaagaggagcggaactcccgcacatgacctcccaccctaggagggagggaaggacaccgtcctagggtataacctggcaataaaccgtgcctctcactgtgaaaaaaaaaaaaaaaaaaaaaaaaaa

SEQ ID NO: 368 - protein, 587 aa, Homo sapiens
MGWDLGTRLFQRQEQRSRLSRIWLEKTRVFLEGSTRTPALPHCLFWLLQVPSTQDPLFPGYGPQCPVDLAGPPCLRPLFGGLGGYWRALQRGREGRTMTSRASELSPGRSVTAGIIIVGDEILKGHTQDTNTFFLCRTLRSLGVQVCRVSVVPDEVATIAAEVTSFSNRFTHVLTAGGIGPTHDDVTFEAVAQAFGDELKPHPKLEAATKALGGEGWEKLSLVPSSARLHYGTDPCTGQPFRFPLVSVRNVYLFPGIPELLRRVLEGMKGLFQNPAVQFHSKELYVAADEASIAPILAEAQAHFGRRLGLGSYPDWGSNYYQVKLTLDSEEEGPLEECLAYLTARLPQGSLVPYMPNAVEQASEAVYKLAESGSSLGKKVAGALQTIETSLAQYSLTQLCVGFNGGKDCTALLHLFHAAVQRKLPDVPNPLQILYIRSISPFPELEQFLQDTIKRYNLQMLEAEGSMKQALGELQARHPQLEAVLMGTRRTDPYSCSLCPFSPTDPGWPAFMRINPLLDWTYRDIWDFLRQLFVPYCILYDRGYTSLGSRENTVRNPALKCLSPGGHPTYRPAYLLENEEEERNSRT

SEQ ID NO: 369 - DNA, 2250 bp, Homo sapiens
ggcgaccagagttgctgggcagtcttgggtttagtgccgcaatgctgcacttctgacaggctgcttcctggatccctgcagggacctggccagggcattggccccaggtcacctgtggctttggggagagcagttgcagggctggcctgggctgtgggaggcagctgtgccgttttctgacagccattgggaccgccccagtacccgaagaggtggctgccctgagttgccacgggaaactgcagggtggccctggctcagcagccaaccttggggagacctggaggaacagtgcagtgtaaagatggcctcgcgctgagcgggtccccgcagtcggcactcccaggagaaccagcgggctgtgcatgtgacccgccagcctgcaccgcgggcacgtccttcccacccagaggaccctgcactgccttcagggccacagcagtcctccggggcccagcctcaggcaggaaacagcaaatgcttttgctgccaaccaagtgtggctgtcgctttcgatgatgccagtggcgctggtgcgactgccgggcagcatgtgtgggcggggatggctcggccactgaccgtctccccgcagtggtggtcctgctccatgatgtccgtgatgtgagcgtggaggaggagaaggtccggtacttcgggaaaggctacatggtggtgctccggcttgcagacgggcttctcccaccccctcacgcagagtgcagtcatgggccaccgcagtgatgtggaagccatcgcaagctcatcaccagcttcctggagctgcactgccttgagagccccacagagctgtctcagagcagcgacagtgaggccggtgaccctgcaagccagagctgacagccccactgtgcctgagcccgtgcaccgcccacaggacccatggcacattcccggtgtgcctgagcccgtgcaccgcccacaggacccgtggcacattcccggtgtgcctgagcccgtgcaccgcccacaggacccgtggcacattcccggtgtgcctgagcccgtgcaccccccacaggacccgtggcacattcccggtgtgcctgagcccgtgcaccgcccacaggacccgtggccttggcttcagttggtgcctccagccgagttggcctattgcctgctcatgctgctgcttgcacactgcatgaaacagcaggccagaccaggacatccagactttctccatcgtgaggcctgggcctgcctttctgcagccggagtctcgccagccctggactcctgctttgggccacagcaagacctcgggcgagtggagaggcggcccacgccgccccttgtgggtgctgatgctgcatgttgtccccgacacagcgtcctctccctggtggacatccccagcggtcagggtgcttccccaaggcagtgaggggtgaacatccagggcctacctggctgtgacgctgaagccacactgtggaagctgcccctccccgaggacccgcctcccttgctgatgccaggatctcggcgcatagaccactctgccccagcggtcgtcacagaaaggtctctctgttcctcacactcagcttcagcataagctgtgaggccagaaaaaaggtcagctcttctagtatcgtgcagtgcttaaaaaccgggagctccagccgggcgcagtggttcatgccagtaatcccagcactttcggaggccgaggtgggaggattgcttgaggccaggagttcaagaccagcctgggcaacacagcaagatcctgtctttgtaaaaaaactaaccaaacaggaaaaactgggagattttctgcagaaattgagttccagcctctctcgaacctgggaagacctggcaggagggggctgggctctcggctacagacttctccccaccccgtaggagctgaacgccaaccatcctgacccgccagtgctcttggtctcctgagtgtacccaggtcctcccaggtgcggtgtgcaccgagcgcgcctggcctgatgccctggcctgtgagctggggactcctgggccctgtgagcccctaggcggcaggcccaggaatggctgggtaggacagggaacacctttgccccacgtctggctgtgacctcggtgaaagccgacaggagagagatgggaccctcctcctcagtagtggctgccagtccctcgttgcaggacagggtcatcataaccataaataacccttcacgtgtcaaaaaaaaaaaaaaaaaaaaaaaaaaaaaaaaa

SEQ ID NO: 370 - protein, 227 aa, Homo sapiens
MGHRSDVEAIASSSPASWSCTALRAPQSCLRAATVRPVTLQARADSPTVPEPVHRPQDPWHIPGVPEPVHRPQDPWHIPGVPEPVHRPQDPWHIPGVPEPVHPPQDPWHIPGVPEPVHRPQDPWPWLQLVPPAELAYCLLMLLLAHCMKQQARPGHPDFLHREAWACLSAAGVSPALDSCFGPQQDLGRVERRPTPPLVGADAACCPRHSVLSLVDIPSGQGASPRQ

SEQ ID NO: 371 - DNA, 444 bp, Homo sapiens
gcttttaaagttttcagactttatttcacagcgattgacacagaaacatactagagttagtaacacggcacccagccccaccgccgcccgcttcatcgggtcctgctcctaggaggactgggctggggctgggggtggggatgggatgggggtggggaagggtccgccctgacactggtagtgagggccgaaaagagcaagggaggatggggagatgggagagggtgggcgtcagagacgcctgttgggaggatggggtgggataaactggcagggaggaggcctagaacggctgataatggcagaagacacaaatagaaacctggaggatctcggaggaggaaggtaagggggaggaagggggagggggggaggtagtccgaaatactgcgcgaggaaccctggcggggggacggagaacggaagagggagcaagtatgaaaa

SEQ ID NO: 372 - protein, 488 aa, Homo sapiens
CHGGAPCQNLEAGRFHCQCPPGRVGPTCADEKSPCQPNPCHGAAPCRVLPEGGAQCECPLGREGTFCQTASGQDGSGPFLADFNGFSHLELRGLHTFARDLGEKMALEVVFLARGPSGLLLYNGQKTDGKGDFVSLALRDRRLEFRYDLGKGAAVIRSREPVTLGAWTRVSLERNGRKGALRVGDGPRVLGESPVPHTVLNLKEPLYVGGAPDFSKLARAAAVSSGFDGAIQLVSLGGRQLLTPEHVLRQVDVTSFAGHPCTRASGHPCLNGASCVPREAAYVCLCPGGFSGPHCEKGLVEKSAGDVDTLAFDGRTFVEYLNAVTESEKALQSNHFELSLRTEATQGLVLWSGKATERADYVALAIVDGHLQLSYNLGSQPVVLRSTVPVNTNRWLRVVAHREQREGSLQVGNEAPVTGSSPLGATQLDTDGALWLGGLPELPVGPALPKAYGTGFVGCLRDVVVGRHPLHLLEDAVTKPELRPCPTP

SEQ ID NO: 373 - DNA, 943 bp, Homo sapiens
gctacctccaactgctgaggaaccggttgcctaaaaggagccggcaaaagcgcctacgtggagtccagaggagcggaagtagtcagatttgactgagagccgtaaagcgcggctggctctcgttttccggataacgactacagctccgactgtcagtgccggccttcctcgtgtgaggggatctgccggacccctgcaaattcaatttctttcccattccgggcccttccctatcgtcgcccccttcaccttggatcatgttcaagaaatttgatgaaaaagaaaatgtgtccaactgcatccagttgaaaacttcagttattaagggtattaagaatcaattgatagagcaatttccaggtattgaaccatggcttaatcaaatcatgcctaagaaagatcctgtcaaaatagtccgatgccatgaacatatagaaatccttacagtaaatggagaattactcttttttagacaaagagaagggcctttttatccaaccctaagattacttcacaaatatccttttatcctgccacaccagcaggttgataaaggagccatcaaatttgtactcagtggagcaaatatcatgtgtccaggcttaacttctcctggagctaagctttaccctgctgcagtagataccattgttgctatcatggcagaaggaaaacagcatgctctatgtgttggagtcatgaagatgtctgcagaagacattgagaaagtcaacaaaggaattggcattgaaaatatccattatttaaatgatgggctgtggcatatgaagacatataaatgagcctcagaaggaatgcacttgggctaaatatggatattgtgctgtatctgtgtttgtgtctgtgtgtgacagcatgaagataatgcctgtggttatgctgaataaattcaccagatgctaaaaaaaaaaaaaaaaaaaaa

SEQ ID NO: 374 - protein, 181 aa, Homo sapiens
MFKKFDEKENVSNCIQLKTSVIKGIKNQLIEQFPGIEPWLNQIMPKKDPVKIVRCHEHIEILTVNGELLFFRQREGPFYPTLRLLHKYPFILPHQQVDKGAIKFVLSGANIMCPGLTSPGAKLYPAAVDTIVAIMAEGKQHALCVGVMKMSAEDIEKVNKGIGIENIHYLNDGLWHMKTYK

SEQ ID NO: 375 - DNA, 961 bp, Homo sapiens
ggacaatttgtgggccatttaattcagggcccccaattcgtacgtggagaagtgggaatgcaaaagtactttgacctttaaccttcggtccggcgcggtggagggaaacgcctccgtctctatataaggaattttccggtctcttcgggtcctttttcctctcttcagcgtggggcgcccacaatttgcgcgctctctttctgctgctccccagctctcggatacagccgacaccatgggtttcggagacctgaaaagccctgccggcctccaggtgctcaacgattacctggcggacaagagctacatcgaggggtatgtgccatcacaagcagatgtggcagtatttgaagccgtgtccagcccaccgcctgccgacttgtgtcatgccctacgttggtataatcacatcaagtcttacgaaaaggaaaaggccagcctgccaggagtgaagaaagctttgggcaaatatggtcctgccgatgtggaagacactacaggaagtggagctacagatagtaaagatgatgatgacattgacctctttggatctgatgatgaggaggaaagtgaagaagcaaagaggctaagggaagaacgtcttgcacaatatgaatcaaagaaagccaaaaaacctgcacttgttgccaagtcttccatcttactagatgtgaaaccttgggatgatgagacagatatggcgaaattagaggagtgcgtcagaagcattcaagcagacggcttagtctggggctcatctaaactagttccagtgggatacggaattaagaaacttcaaatacagtgtgtagttgaagatgataaagttggaacagatatgctggaggagcagatcactgcttttgaggactatgtgcagtccatggatgtggctgctttcaacaagatctaaaatccatcctggatcatggcatttaaataaaagattgaaagattaaaa

SEQ ID NO: 376 - protein, 225 aa, Homo sapiens
MGFGDLKSPAGLQVLNDYLADKSYIEGYVPSQADVAVFEAVSSPPPADLCHALRWYNHIKSYEKEKASLPGVKKALGKYGPADVEDTTGSGATDSKDDDDIDLFGSDDEEESEEAKRLREERLAQYESKKAKKPALVAKSSILLDVKPWDDETDMAKLEECVRSIQADGLVWGSSKLVPVGYGIKKLQIQCVVEDDKVGTDMLEEQITAFEDYVQSMDVAAFNKI

SEQ ID NO: 377 - DNA, 7246 bp, Homo sapiens
ggaagcggaagtgaagggtgcgcttggcggcggcggcgggagctgcggagtcgggaatcaaaacaaagggcctggggggggcggggggaaggcggcggggccggaatgtgagcggaggtggagccggcggcagagggtggaagaatgaaagaaaagaaagatgaaaggatgttgaatcactttgcatggctgtatgatggaaggaaacggaactgagaactcctgcagtagaacacgtggatggcttcaacaagataatgatgctaagccatggctttggaaattctctaattgcttttctcgtcctgagcagacgctgccacatagtccccaaacgaaagagtacatggagaacaagaaagttgctgtggaactaaaggatgtaccatcaccccttcatgctggctctaagctttttccagcagtcccacttcctgatattcgttctcttcagcagcctaaaatacagctttcttctgtccccaaagtaagctgctgtgctcattgccctaatgaaccctccacttcgccaatgcgttttggtggtggtggtggcggtagcggaggtaccagtagcttgattcacccgggcgcactgttagactcgcaaagcaccaggacaatcacgtgtcaggtagggtcagggtttgctttccagtctgcatcttcactccagaatgcctcagctaggaacaatttggcaggcattgcaagtgactttcccagcatgtgtctagagagtaacctgtcttcctgcaaacacctgccctgttgtggaaaactccacttccagtcatgtcatggtaatgtgcacaagctgcatcagtttccgagtctgcagggctgcacctccgctggctatttcccctgttctgatttcacaagcggggctccagggcatttggaagagcacatttcacagtcggagctaacgcctcacttgtgcaccaactctttgcaccttaatgtggtacctccggtttgtttaaagggctcactttactgcgaagactgtctaaacaagccagcaagaaatagcataatcgatgcggctaaagtctggccaaatataccacctccaaatactcaacctgcacctcttgctgtccctctgtgtaatggctgtggaaccaaaggaacagggaaggagaccacgttgttattggcgaccagtctaggcaaagctgcttcaaaatttgggtcaccagaagttgcagtagctggacaggtgctagaaaacttaccccccattggagttttttgggatattgaaaactgctccgttccctctggccggtcagcaactgctgttgtgcaaagaatccgtgagaagttttttaaaggccacagagaagcagaattcatctgtgtatgtgacatcagtaaagaaaacaaggaagttattcaagagctgaataattgccaggtaaccgttgcccacatcaatgctactgcaaagaatgccgctgatgataaactgcggcagagtctccgcagatttgcaaatacacacactgctccagccacagtggttcttgtgtcaactgatgtcaattttgcattggaacttagtgacctgagacacaggcatggtttccacattattttggtccataaaaaccaggcctcagaagcactgctgcatcatgctaacgagctgatcagatttgaagagttcatttccgacttgccccccaggttaccactaaaaatgccagagctgtgccgcatggagtcaaaaactggtcatagaaacagtgagcaccagcaaggtcacctgaggctggtcgtacccactcacggtaactcaagtgctgcagtgtcgacgccgaaaaactcgggggtggcagaacccgtttacaaaaccagtcagaaaaaggagaacctcagtgcccgaagtgttaccagttctcctgtagagaaaaaagataaagaggagactgtattccaagtgagttacccgtctgcttttagcaagttagttgcatccaggcaagtcagtcctctgctcgcatctcagtcttggtcttctagcgaagccgactgcccagacccatttgcaaatggtgctgatgtccaagtcagcaacatagactacagattatcccggaaggagctgcagcagctcctgcaggaagcatttgccaggcatggcaaggtgaagagtgttgagctcagcccccatacagattatcaactcaaggctgttgtgcaaatggaaaacttacaagatgcgatcggtgcagtgaatagcctccacagatacaaaattggcagcaaaaagatcctggtctcacttgccaccggggctgccagcaaatcactctctttactgagtgcagaaacaatgtctgttcttcaggatgcccctgcctgttgcctgcctctgtttaaatttacagatatctatgaaaaaagtttggacacaagttgaatgtgtcagatctatataaattaacagacacggtcgcaatccgtgaacaaggaaacggacggctggtgtgtctcctacccagcagtcaggcccgccagagccccttggggtcttcccagtcacacgacggctcctccacgaattgcagcccaattatatttgaagagttagaatatcacgagcctgtctgcagacagcattgttccaataaggatttcagcgaacatgaatttgatccagactcttacaagattccttttgtgattctttctttgaagacatttgcgccccaggttcacagtcttctccagacccacgagggcaccgtgcctttattgagctttccagattgttacattgcagagtttggcgatctagaagtagtgcaagaaaaccaaggaggtgttcccttagaacacttcattacctgtgttccaggtgtaaacattgccactgctcagaatggcatcaaagtggttaaatggattcacaacaagcccccgcctcccaacactgacccttggcttctgcgttcgaagagtcctgtaggtaacccccagctgatccagttcagtagagaagtgattgacttgctgaaaagccagccatcttgtgtcatacccatcagtcatttcatcccatcctatcaccatcattttgcaaagcagtgccgagtgtcagactacggatactccaagctgattgagttattagaagcagtgcctcatgtattgcagattcttggaatgggctccaaacgtctgctgacccttacccacagggcccaggtgaagcgctttactcaggatttactaaaacttctcaaatcccaggccagcaaacaggtcattgtgagagaattctcacaggcttatcactggtgtttctcaaaggactgggatgtcactgaatatggtgtttgtgagttgattgacatcgtatcagagattccagacacaaccatctgcttgtcccaacaagataatgaaatggtgatttgtatccccaaaagagaacgcactcaggatgaaatagaaaggacaaaacagttctccaaggatgtcgttgatttgctgcgtcaccaaccccatttccggatgccctttaataaatttatcccttcttaccatcaccactttggccggcagtgcaaacttgcgtactatgggtttaccaaactacttgaactttttgaagccatacctgatactttacaagtattggaatgtggagaagaaaagatccttactctgacagaggtggagcggttcaaagctctagctgcccagtttgttaaactccttcggtcccaaaaagataactgccttatgatgacagatctccttacagaatatgctaaaacttttggttatacatttcgtctccaagactatgatgtcagttccatttcggctttaactcagaaactctgccatgtcgtgaaggttgccgatatagaatctggcagacagattcagctgatcaaccgaaagtctctgcgatctctcactgcccagttgctggtattgttgatgtcttgggaaggaaccacccatctttctgttgaggagctcaagagacattacgaaagtacccacaacactccccttaacccctgtgaatatggattcatgaccttgaccgaactgctgaagagcctgccatacttggttgaggttttcactaatgataagatggaagaatgtgtgaagctcacaagtctgtatttgtttgcaaagaatgtgcggtctttacttcatacttaccactaccagcagattttccttcatgagttttccatggcctataccaagtatgtcggagaaactctgcagcccaagacctacggccacagcagcgtggaggagctcttgggagcaattccacaggtggtctggataaaaggacatggtcataagagaattgtagtgttaaaaaatgacatgaaaagtcgtttgagttcactcagtctctcccctgccaatcatgaaaaccagccctcggagggcgagcgcatcctggaggtgcccgaatcgcacacagcctcggaactcaagcttggagctgacggcagtgggcccagtcacacagagcaggagcttctccgcctgaccgacgactcccccgtcgacctcctgtgtgcgcctgtcccctcgtgcctgccgtcccctcagctgagaccagaccccgttatcctccaatctgctgatctcattcagtttgaggagcgccctcaagagccttctgaaattatgattttaaaccaagaagaaaaaatggagattccaataccaggaaagagcaaaactctgacctctgactccagctcgtcctgcatctcagcagctgtccccgtgcctccctgcccctcctcggaaacctccgagtcactgctcagcaaggaccccgtggaaagcccggccaaaaagcaacccaaaaatagagtcaaattggcagccaacttttccttagcacctataaccaagctttaactcccatttggaatatagaattaggatgggaaaacactgtctgattctgcacacaaaagtgggtttcaaaaatacatccttttctgtgtcatgaaaaccccccgaagccattgacttcatcttacctgtgttctatcatgtttttcttttccattgaacacagctttgagctgaagtctttcttttcttcttcctttttctttcttttttcaattatttgaagaacttgtggcatttgttaaagaatccttaatatattttaccaaatttttagtaactattatgaaatacaatggtgttccaaaagaagaaagcactaaaaactcaactagcaggaagcggttttgcttccattgagccacgtcggtggtgtcatcctacatgtagcataatagagtctctcagcctttgcttactggtgtttccgacagtattaacccagtgcgtggcatgtctttgaagcaaagcctgtcccgctagcctgtgtgttcacacaccaaaggagaagggtaggcgaggggttcggagtgtattttcaggttggaatgtgaaggttcctggcttccatgtgacttgtaagtgtgccttgttttttatttaaactatgtctgtagttgacaaaagtggcttcatcacaaatttttttaaacgtttctactttggggttccatttaggagctttctagaaagttgaggatgtttgaagcttcccttctgtgttccagtttgatatgggttaggttaaggaaaaggagatggtctcgatgtcatggatttaaagtcagcatttggattacaacacacattattgtgtgtcgagaggcagcattggaaagagcctgattttctaaaatatgcatcaagtgcataaattacaaatcagagctgagtggggaggtgcttcagcagcagcgggatcaatacgatttccactgggaagagacaggaattctacctacacataggaaggccaaggttgatccacttaaccttgttattgtaattttaaagctggtatcggtagctgggaagctttatgtgtgtgtatgtcagctcagcatcttttaatcgtgtctgattttactctcgttacttctcgctgttggaagcatctctgggtttcttgtggcgtctggtgtggaatggccttcctctctaggtgcctgaggtgtccgctgacgggtggcctctcacccccctctagagaaacctgacatttacaatggattgtatttgtccggcaaaaaaggcggattcattcatagagcagaaagaacctgttggcgtaaggtcttccactagttagatggtttcttttggggaaatgtttatatttggtaacttctagaaagccagaaaatggactctgatttcatagcattttgataaaatgccacaaaataagggctatagagagatttttacaagtcagattttttgttccccaaatcttttaaatgaagccagtgactcccagttctcaacacatggccccagtcaagacagaacaccatggaaaaaaccctgtaagtattatggcactctccgaatcctcctgaaggcatttcctctacagacatagtgttacaggaagtgaaatgcaaatgtgcaattttttttaaaggagcttttaaacaaagtaataataattggtgttgagaacatcagttgccttattctaagatttcataaggctgagtttgcacgcttggacttcagttctgctagcatgtaaagagtggtggactttaaaaccgtaagaggtatcattacaagtcacctggaacagactcaaagaacaggttctttgggcaacagacaaagaagaatcaagttctgtgctgtcccgtgagtgtgtctgagtaccattcactggagttgctgcttaggtctgggacgtgtgtgtgactcttaacaattgctgtctgaaaatgagagagaagacttcggaagcacattgtgttcataatgtactccacaatggccagtccaattgctatctatttttttatccagaggcttaattaaatgatgtggtaaaatgatgtttgagcattaagacaatgtaattctttatttctgggtggaaagatataccggattaaatttatctgtttaaaaaaatgacaaaagttatcaccaaaaccccctttcccatcttgcactgtttgttttggattgggtttgggggaaagagatgtttttcttagttgtctactttgtttgaacacttttgttgtggttcaagtgctgttttgtgtgttgggaccaaacagttgtcaataaactttacaagcgagcatctaaaaaaaaaaaaaaa

SEQ ID NO: 378 - protein, 581 aa, Homo sapiens
MGSKRLLTLTHRAQVKRFTQDLLKLLKSQASKQVIVREFSQAYHWCFSKDWDVTEYGVCELIDIVSEIPDTTICLSQQDNEMVICIPKRERTQDEIERTKQFSKDVVDLLRHQPHFRMPFNKFIPSYHHHFGRQCKLAYYGFTKLLELFEAIPDTLQVLECGEEKILTLTEVERFKALAAQFVKLLRSQKDNCLMMTDLLTEYAKTFGYTFRLQDYDVSSISALTQKLCHVVKVADIESGRQIQLINRKSLRSLTAQLLVLLMSWEGTTHLSVEELKRHYESTHNTPLNPCEYGFMTLTELLKSLPYLVEVFTNDKMEECVKLTSLYLFAKNVRSLLHTYHYQQIFLHEFSMAYTKYVGETLQPKTYGHSSVEELLGAIPQVVWIKGHGHKRIVVLKNDMKSRLSSLSLSPANHENQPSEGERILEVPESHTASELKLGADGSGPSHTEQELLRLTDDSPVDLLCAPVPSCLPSPQLRPDPVILQSADLIQFEERPQEPSEIMILNQEEKMEIPIPGKSKTLTSDSSSSCISAAVPVPPCPSSETSESLLSKDPVESPAKKQPKNRVKLAANFSLAPITKL

SEQ ID NO: 379 - DNA, 1037 bp, Homo sapiens
cccacgcgtccgcccacgcgtccgcaaaatattcagagactcgagcacagcacccagacttcatgcgcccgtggaatgctcaccacatgttggtcgaagcggccgaccactgactttgtgacttaggcggctgtgttgcctatgtagagaacacgcttcacccccactccccgtacagtgcgcacaggctttatcgagaataggaaaacctttaaaccccggtcatccggacatcccaacgcatgctcctggagctcacagccttctgtggtgtcatttctgaaacaagggcgtggatccctcaaccaagaagaatgtttatgtcttcaagtgacctgtactgcttggggactattggagaaaataaggtggagtcctacttgtttaaaaaatatgtatctaagaatgttctagggcactctgggaacctataaaggcaggtatttcgggccctcctcttcaggaatcttcctgaagacatggcccagtcgaaggcccaggatggcttttgctgcggccccgtggggtaggagggacagagagacagggagagtcagcctccacattcagaggcatcacaagtaatggcacaattcttcggatgactgcagaacatagtgtatgtagttcaacaactcacgacgaagcttatttctgaggataagctctttcacaggcaaagcttattttcatctctcatctttggtctcctagcccaggtcaccgactcggtactatcgaaccggacggggactggtgtcgggagagccctcagagaccggggcccttgagattcccccaggggtgtgtgtgaccccatacgagggatccccagagggacctctataatgtcacccattatttgccgagaagaaaattttgcggtcaccatgtggtcttaaaagtcccccattagttggacgcacctgtacatagcctctccagctagtgtagcagcccatcgtaccacgtgtcgccatagtaagatactcccacacagcaggtctcatcgccacaagtgggatgcgtcgatgacc

SEQ ID NO: 380 - protein, 291 aa, Homo sapiens
MQRARPTLWAAALTLLVLLRGPPVARAGASSGGLGPVVRCEPCDARALAQCAPPPAVCAELVREPGCGCCLTCALSEGQPCGIYTERCGSGLRCQPSPDEARPLQALLDGRGLCVNASAVSRLRAYLLPAPPAPGNASESEEDRSAGSVESPSVSSTHRVSDPKFHPLHSKIIIIKKGHAKDSQRYKVDYESQSTDTQNFSSESKRETEYGPCRREMEDTLNHLKFLNVLSPRGVHIPNCDKKGFYKKKQCRPSKGRKRGFCWCVDKYGQPLPGYTTKGKEDVHCYSMQSK

SEQ ID NO: 381 - DNA, 2575 bp, Homo sapiens
gggacacagagggaggaagaagcggcggcggcggcggcggcggcggcggctcctctttgcagagggggaaactcttgggctgagagcaggaataatgcggtaggcaaggcgggctgctggctcccccggctccggcagcagcggcggcagcccgagcagcggcagcagcagcggcagcaccccaggcgctgacagccccgccggccggctccgttgctgaccgccgactgtcaatggagctggaaaacatcgtggccaacacggtcttgctgaaagccagggaagggggcggaggaaagcgcaaagggaaaagcaagaagtggaaagaaatcctgaagttccctcacattagccagtgtgaagacctccgaaggaccatagacagagattactgcagtttatgtgacaagcagccaatcgggaggctgcttttccggcagttttgtgaaaccaggcctgggctggagtgttacattcagttcctggactccgtggcagaatatgaagttactccagatgaaaaactgggagagaaagggaaggaaattatgaccaagtacctcaccccaaagtcccctgttttcatagcccaagttggccaagacctggtctcccagacggaggagaagctcctacagaagccgtgcaaagaactcttttctgcctgtgcacagtctgtccacgagtacctgaggggagaaccattccacgaatatctggacagcatgttttttgaccgctttctccagtggaagtggttggaaaggcaaccggtgaccaaaaacactttcaggcagtatcgagtgctaggaaaagggggcttcggggaggtctgtgcctgccaggttcgggccacgggtaaaatgtatgcctgcaagcgcttggagaagaagaggatcaaaaagaggaaaggggagtccatggccctcaatgagaagcagatcctcgagaaggtcaacagtcagtttgtggtcaacctggcctatgcctacgagaccaaggatgcactgtgcttggtcctgaccatcatgaatgggggtgacctgaagttccacatctacaacatgggcaaccctggcttcgaggaggagcgggccttgttttatgcggcagagatcctctgcggcttagaagacctccaccgtgagaacaccgtctaccgagatctgaaacctgaaaacatcctgttagatgattatggccacattaggatctcagacctgggcttggctgtgaagatccccgagggagacctgatccgcggccgggtgggcactgttggctacatggctccagaggtcctgaacaaccagaggtacggcctgagccccgactactggggccttggctgcctcatctatgagatgatcgagggccagtcgccgttccgcggccgcaaggagaaggtgaagcgggaggaggtggaccgccgggtcctggagacggaggaggtgtactcccacaagttctccgaggaggccaagtccatctgcaagatgctgctcacgaaagatgcgaagcagaggctgggctgccaggaggagggggctgcagaggtcaagagacaccccttcttcaggaacatgaacttcaagcgcttagaagccgggatgttggaccctcccttcgttccagacccccgcgctgtgtactgtaaggacgtgctggacatcgagcagttctccactgtgaagggcgtcaatctggaccacacagacgacgacttctactccaagttctccacgggctctgtgtccatcccatggcaaaacgagatgatagaaacagaatgctttaaggagctgaacgtgtttggacctaatggtaccctcccgccagatctgaacagaaaccaccctccggaaccgcccaagaaagggctgctccagagactcttcaagcggcagcatcagaacaattccaagagttcgcccagctccaagaccagttttaaccaccacataaactcaaaccatgtcagctcgaactccaccggaagcagctagtttcggctctggcctccaagtccacagtggaaccagcccagacccttctccttagaagtggaagtagtggagcccctgctctggtggggctgccaggggagaccccgggagccggggaaggaggccgtccatcccgtcgacgtagaacctcgaggtttctcaaagaaatttccactcaggtctgttttccgaggcggccccggccggggtggattggatttgtctttggtgaacattgcaatagaaatccaattggatacgacaacttgcacgtattttaatagcgtcataactagaactgaattttgtctttatgatttttaaagaaaagttttgtaaatttctctactgtctcagtttacattttgtatatttgtatttaaatgaaagtgagactttgagggtgtatattttctgtgcagccactgttaagccatgtgttccaaggcattttagcggggagggggttatcaaaaaaaaaaaaatgtgactcaagacttccagagcctcaaatgagaaaatgtctttattaaatgtagaaagtgatccataaaaaaaaaaaaaaaaaa

SEQ ID NO: 382 - protein, 590 aa, Homo sapiens
MELENIVANTVLLKAREGGGGKRKGKSKKWKEILKFPHISQCEDLRRTIDRDYCSLCDKQPIGRLLFRQFCETRPGLECYIQFLDSVAEYEVTPDEKLGEKGKEIMTKYLTPKSPVFIAQVGQDLVSQTEEKLLQKPCKELFSACAQSVHEYLRGEPFHEYLDSMFFDRFLQWKWLERQPVTKNTFRQYRVLGKGGFGEVCACQVRATGKMYACKRLEKKRIKKRKGESMALNEKQILEKVNSQFVVNLAYAYETKDALCLVLTIMNGGDLKFHIYNMGNPGFEEERALFYAAEILCGLEDLHRENTVYRDLKPENILLDDYGHIRISDLGLAVKIPEGDLIRGRVGTVGYMAPEVLNNQRYGLSPDYWGLGCLIYEMIEGQSPFRGRKEKVKREEVDRRVLETEEVYSHKFSEEAKSICKMLLTKDAKQRLGCQEEGAAEVKRHPFFRNMNFKRLEAGMLDPPFVPDPRAVYCKDVLDIEQFSTVKGVNLDHTDDDFYSKFSTGSVSIPWQNEMIETECFKELNVFGPNGTLPPDLNRNHPPEPPKKGLLQRLFKRQHQNNSKSSPSSKTSFNHHINSNHVSSNSTGSS

SEQ ID NO: 383 - DNA, 2780 bp, Homo sapiens
gtgggcggaccgcgcggctggaggtgtgaggatccgaacccaggggtggggggtggaggcggctcctgcgatcgaaggggacttgagactcaccggccgcacgccatgagggccctgtgggtgctgggcctctgctgcgtcctgctgaccttcgggtcggtcagagctgacgatgaagttgatgtggatggtacagtagaagaggatctgggtaaaagtagagaaggatcaaggacggatgatgaagtagtacagagagaggaagaagctattcagttggatggattaaatgcatcacaaataagagaacttagagagaagtcggaaaagtttgccttccaagccgaagttaacagaatgatgaaacttatcatcaattcattgtataaaaataaagagattttcctgagagaactgatttcaaatgcttctgatgctttagataagataaggctaatatcactgactgatgaaaatgctctttctggaaatgaggaactaacagtcaaaattaagtgtgataaggagaagaacctgctgcatgtcacagacaccggtgtaggaatgaccagagaagagttggttaaaaaccttggtaccatagccaaatctgggacaagcgagtttttaaacaaaatgactgaagcacaggaagatggccagtcaacttctgaattgattggccagtttggtgtcggtttctattccgccttccttgtagcagataaggttattgtcacttcaaaacacaacaacgatacccagcacatctgggagtctgactccaatgaattttctgtaattgctgacccaagaggaaacactctaggacggggaacgacaattacccttgtcttaaaagaagaagcatctgattaccttgaattggatacaattaaaaatctcgtcaaaaaatattcacagttcataaactttcctatttatgtatggagcagcaagactgaaactgttgaggagcccatggaggaagaagaagcagccaaagaagagaaagaagaatctgatgatgaagctgcagtagaggaagaagaagaagaaaagaaaccaaagactaaaaaagttgaaaaaactgtctgggactgggaacttatgaatgatatcaaaccaatatggcagagaccatcaaaagaagtagaagaagatgaatacaaagctttctacaaatcattttcaaaggaaagtgatgaccccatggcttatattcactttactgctgaaggggaagttaccttcaaatcaattttatttgtacccacatctgctccacgtggtctgtttgacgaatatggatctaaaaagagcgattacattaagctctatgtgcgccgtgtattcatcacagacgacttccatgatatgatgcctaaatacctcaattttgtcaagggtgtggtggactcagatgatctccccttgaatgtttcccgcgagactcttcagcaacataaactgcttaaggtgattaggaagaagcttgttcgtaaaacgctggacatgatcaagaagattgctgatgataaatacaatgatactttttggaaagaatttggtaccaacatcaagcttggtgtgattgaagaccactcgaatcgaacacgtcttgctaaacttcttaggttccagtcttctcatcatccaactgacattactagcctagaccagtatgtggaaagaatgaaggaaaaacaagacaaaatctacttcatggctgggtccagcagaaaagaggctgaatcttctccatttgttgagcgacttctgaaaaagggctatgaagttatttacctcacagaacctgtggatgaatactgtattcaggcccttcccgaatttgatgggaagaggttccagaatgttgccaaggaaggagtgaagttcgatgaaagtgagaaaactaaggagagtcgtgaagcagttgagaaagaatttgagcctctgctgaattggatgaaagataaagcccttaaggacaagattgaaaaggctgtggtgtctcagcgcctgacagaatctccgtgtgctttggtggccagccagtacggatggtctggcaacatggagagaatcatgaaagcacaagcgtaccaaacgggcaaggacatctctacaaattactatgcgagtcagaagaaaacatttgaaattaatcccagacacccgctgatcagagacatgcttcgacgaattaaggaagatgaagatgataaaacagttttggatcttgctgtggttttgtttgaaacagcaacgcttcggtcagggtatcttttaccagacactaaagcatatggagatagaatagaaagaatgcttcgcctcagtttgaacattgaccctgatgcaaaggtggaagaagagcccgaagaagaacctgaagagacagcagaagacacaacagaagacacagagcaagacgaagatgaagaaatggatgtgggaacagatgaagaagaagaaacagcaaaggaatctacagctgaaaaagatgaattgtaaattatactctcaccatttggatcctgtgtggagagggaatgtgaaatttacatcatttctttttgggagagacttgttttggatgccccctaatccccttctcccctgcactgtaaaatgtgggattatgggtcacaggaaaaagtgggttttttagttgaattttttttaacattcctcatgaatgtaaatttgtactatttaactgactattcttgatgtaaaatcttgtcatgtgtataaaaataaaaaagatcccaaat

SEQ ID NO: 384 - protein, 803 aa, Homo sapiens
MRALWVLGLCCVLLTFGSVRADDEVDVDGTVEEDLGKSREGSRTDDEVVQREEEAIQLDGLNASQIRELREKSEKFAFQAEVNRMMKLIINSLYKNKEIFLRELISNASDALDKIRLISLTDENALSGNEELTVKIKCDKEKNLLHVTDTGVGMTREELVKNLGTIAKSGTSEFLNKMTEAQEDGQSTSELIGQFGVGFYSAFLVADKVIVTSKHNNDTQHIWESDSNEFSVIADPRGNTLGRGTTITLVLKEEASDYLELDTIKNLVKKYSQFINFPIYVWSSKTETVEEPMEEEEAAKEEKEESDDEAAVEEEEEEKKPKTKKVEKTVWDWELMNDIKPIWQRPSKEVEEDEYKAFYKSFSKESDDPMAYIHFTAEGEVTFKSILFVPTSAPRGLFDEYGSKKSDYIKLYVRRVFITDDFHDMMPKYLNFVKGVVDSDDLPLNVSRETLQQHKLLKVIRKKLVRKTLDMIKKIADDKYNDTFWKEFGTNIKLGVIEDHSNRTRLAKLLRFQSSHHPTDITSLDQYVERMKEKQDKIYFMAGSSRKEAESSPFVERLLKKGYEVIYLTEPVDEYCIQALPEFDGKRFQNVAKEGVKFDESEKTKESREAVEKEFEPLLNWMKDKALKDKIEKAVVSQRLTESPCALVASQYGWSGNMERIMKAQAYQTGKDISTNYYASQKKTFEINPRHPLIRDMLRRIKEDEDDKTVLDLAVVLFETATLRSGYLLPDTKAYGDRIERMLRLSLNIDPDAKVEEEPEEEPEETAEDTTEDTEQDEDEEMDVGTDEEEETAKESTAEKDEL

SEQ ID NO: 385 - DNA, 1717 bp, Homo sapiens
gcgttttgccacagagccgtaaaggcgcgcgggaacatggggctgtatgctgcagctgcaggcgtgttggccggcgtggagagccgccagggctctatcaaggggttggtgtactccagcaacttccagaacgtgaagcagctgtacgcgctggtgtgcgaaacgcagcgctactccgccgtgctggatgctgtgatcgccagcgccggcctcctccgtgcggagaagaagctgcggccgcacctggccaaggtgctagtgtatgagttgttgttgggaaagggctttcgagggggtgggggccgatggaaggctctgttgggccggcaccaggcgaggctcaaggctgagttggctcggctcaaggttcatcggggtgtgagccggaatgaggacctgttggaagtgggatccaggcctggtccagcctcccagctgcctcgatttgtgcgtgtgaacactctcaagacctgctccgatgatgtagttgattatttcaagagacaaggtttctcctatcagggtcgggcttccagcctcgatgacttacgagccctcaaggggaagcattttctcctggaccccttgatgccggagctgctggtgtttcccgcccagacagatctgcatgaacacccactgtaccgggccggacacctcattctgcaggacagggccagctgtctcccagccatgctgctggaccccccgccaggctcccatgtcatcgatgcctgtgccgccccaggcaataagaccagtcacttggctgctcttctgaagaaccaagggaagatctttgcctttgacctggatgccaagcggctggcatccatggccacgctgctggcccgggctggcgtctcttgctgtgaactggctgaggaggacttcctggcggtctccccctcggatccacgctaccatgaggtccactacatcctgctggatccttcctgcagtggctcgggtatgccgagcagacagctggaggagcccggggcaggcacacctagcccggtgcgtctgcatgccctggcagggttccagcagcgagccctgtgccacgcgctcactttcccttccctgcagcggctcgtctactccacgtgctccctctgccaggaggagaatgaagacgtggtgcgagatgcgctgcagcagaacccgggcgccttcaggctagctcccgccctgcctgcctggccccaccgaggcctgagcacgttcccgggtgccgagcactgcctccgggcctcccctgagaccacactcagcagtggcttcttcgttgctgtaattgaacgggtcgaggtgccaaggtgagtgagtgggggcgtgcttgggaggcgcaggatggcaccggcacatctaacatctacacttctctagctcagcctcacaggccaaagcatcagcaccagaacgcacacccagcccagccccaaagagaaagaagagacagcaaagagccgcagccggtgcttgcacaccgccttgcacatagcagaggctccgggctgactccttcctggtgggaaaggaagatgcctgtcctctccgtggaggaccctgggccctcaccgcaggaagcagtttgggttttgaaaggttattgggtcccttccttgggctgtgttcttgctggtgagcaaagtgttgcctgcaaaaataaaatgcagaacgtactctaaaaaaaaaaaaaaaaaaaaaaaaa

SEQ ID NO: 386 - protein, 429 aa, Homo sapiens
MGLYAAAAGVLAGVESRQGSIKGLVYSSNFQNVKQLYALVCETQRYSAVLDAVIASAGLLRAEKKLRPHLAKVLVYELLLGKGFRGGGGRWKALLGRHQARLKAELARLKVHRGVSRNEDLLEVGSRPGPASQLPRFVRVNTLKTCSDDVVDYFKRQGFSYQGRASSLDDLRALKGKHFLLDPLMPELLVFPAQTDLHEHPLYRAGHLILQDRASCLPAMLLDPPPGSHVIDACAAPGNKTSHLAALLKNQGKIFAFDLDAKRLASMATLLARAGVSCCELAEEDFLAVSPSDPRYHEVHYILLDPSCSGSGMPSRQLEEPGAGTPSPVRLHALAGFQQRALCHALTFPSLQRLVYSTCSLCQEENEDVVRDALQQNPGAFRLAPALPAWPHRGLSTFPGAEHCLRASPETTLSSGFFVAVIERVEVPR

SEQ ID NO: 387 - DNA, 1206 bp, Homo sapiens
ggaaggggacgcgaaccgtcctggtcccatccgagccgccgtagcgcgagtgccgcgggagttcggcagcccaggtcgccaaggcaacgggctccgctgcgggttgcgggctgcgggcgctaggctgccccggggaggcgctgcggaccggcggcccaggcacggagaggcggcgagaccgcagaattcccgtactgattagtcaacagtggaaaatctgaagagatgcaagcaggaaaaagaaattaaaccaggcctgaggagcgatgcgacaggcatgatggaggtcgagtcctcctactcggacttcatctcctgtgaccggacaggccgtcggaatgcggtccctgacatccagggagactcagaggctgtgagcgtgaggaagctggctggagacatgggcgagctggcactcgagggggcagaaggacaggtggagggaagcgccccagacaaggaagctggcaaccagccccagagcagcgatgggaccacctcgtcttgaatctgaccttgtccaagaaggctggacgagagaccttctgtcccctcccagagggggaaccctggcactggcccagcagcctcttctctgagctccatgtcccagataaaccaggccagactgagaaggctccccagaggcctctgtggcctccactccgggaaagccctctgcccacacccacaggcttcacattcccaccaccttcgcaccgtgcccaggtacactttcaagacactgtaaccacaagatgttatttattgagctggcgccgggacttgggcggggcctgccctacagtgagcagcccacacaggaacgctcctctcgcgagcggcccgggcagggaccctgtcccaacaccaacacctcctctccagcccaatcttctgggtccagacctgcttgtcccttttttagaaaacacttttaaactttttaaaaattttaaaccttttttcagcagatatggagagagctgacaatcaattcacattttttaagccattttagctaaactgtcattgtgcatctctgaggttccctcatggagctccacagatccatttttagggaagggattttggctcaaaacgatctgaccacctctgccctgtccaccaggataagtgacacctaggacccaggaaataaatgccgatgatttgtgtgaaaaaaaaaaaaaaaaaaaaaaaaaa

SEQ ID NO: 388 - protein, 76 aa, Homo sapiens
MMEVESSYSDFISCDRTGRRNAVPDIQGDSEAVSVRKLAGDMGELALEGAEGQVEGSAPDKEAGNQPQSSDGTTSS

SEQ ID NO: 389 - DNA, 9749 bp, Homo sapiens
gagcccggcccgggggacgggcggcgggatagcgggaccccggcggcgcggtgcgcttcagggcgcagcggcggccgcagaccgagccccgggcgcggcaagaggcggcgggagccggtggcggctcggcatcatgcgtcgagggcgtctgctggagatcgccctgggatttaccgtgcttttagcgtcctacacgagccatggggcggacgccaatttggaggctgggaacgtgaaggaaaccagagccagtcgggccaagagaagaggcggtggaggacacgacgcgcttaaaggacccaatgtctgtggatcacgttataatgcttactgttgccctggatggaaaaccttacctggcggaaatcagtgtattgtccccatttgccggcattcctgtggggatggattttgttcgaggccaaatatgtgcacttgcccatctggtcagatagctccttcctgtggctccagatccatacaacactgcaatattcgctgtatgaatggaggtagctgcagtgacgatcactgtctatgccagaaaggatacatagggactcactgtggacaacctgtttgtgaaagtggctgtctcaatggaggaaggtgtgtggccccaaatcgatgtgcatgcacttacggatttactggaccccagtgtgaaagagattacaggacaggcccatgttttactgtgatcagcaaccagatgtgccagggacaactcagcgggattgtctgcacaaaaacgctctgctgtgccacagtcggccgagcctggggccacccctgtgagatgtgtcctgcccagcctcacccctgccgccgtggcttcattccaaatatccgcacgggagcttgtcaagatgtggatgaatgccaggccatccccgggctctgtcagggaggaaattgcattaatactgttgggtcttttgagtgcaaatgccctgctggacacaaacttaatgaagtgtcacaaaaatgtgaagatattgatgaatgcagcaccattcctggaatctgtgaagggggtgaatgtacaaacacagtcagcagttacttttgcaaatgtccccctggtttttacacctctccagatggtaccagatgcatagatgttcgcccaggatactgttacacagctctgacaaacgggcgctgctctaaccagctgccacagtccataaccaaaatgcagtgctgctgtgatgccggccgatgctggtctccaggggtcactgtcgcccctgagatgtgtcccatcagagcaaccgaggatttcaacaagctgtgctctgttcctatggtaattcctgggagaccagaatatcctcccccaccccttggccccattcctccagttctccctgttcctcctggctttcctcctggacctcaaattccggtccctcgaccaccagtggaatatctgtatccatctcgggagccaccaagggtgctgccagtaaacgttactgattactgccagttggtccgctatctctgtcaaaatggacgctgcattccaactcctgggagttgccggtgtgagtgcaacaaagggttccagctggacctccgtggggagtgtattgatgttgatgaatgtgagaaaaacccctgtgctggtggtgagtgtattaacaaccagggttcgtacacctgtcagtgccgagctggatatcagagcacactcacgcggacagaatgccgagacattgatgagtgtttacagaatggccggatctgcaataatggacgctgcatcaacacagatggcagttttcattgcgtgtgtaatgcgggctttcatgttacacgagatgggaagaactgtgaagatatggatgaatgcagcataaggaacatgtgccttaatggaatgtgtatcaatgaagatggcagttttaaatgtatttgcaaacctggattccagctggcatcagatggacgttattgcaaagacattaacgagtgtgaaacccctgggatctgcatgaatgggcgttgcgtcaacactgatggctcctacagatgtgaatgcttccctggactggctgtgggtctggatggccgtgtgtgtgttgacacacacatgcggagcacatgctatggtggatacaagagaggccagtgtatcaaacctttgtttggtgctgtcactaaatctgaatgctgttgcgccagcactgagtatgcatttggggaaccttgccagccgtgtcctgcacagaattcagcggaatatcaggcactctgcagcagtgggccaggaatgacgtcagcaggcagtgatataaatgaatgtgcactagatcctgatatttgcccaaatggaatctgtgaaaaccttcgtgggacctataaatgtatatgcaattcaggatatgaagtggattcaactgggaaaaactgcgttgatattaatgaatgtgtactgaacagtctcctttgtgacaatggacaatgtagaaatactcctggaagttttgtctgtacctgccccaagggatttatctacaaacctgatctaaaaacatgtgaagacattgatgaatgcgaatcaagtccttgcattaatggagtctgcaagaacagcccaggctcttttatttgtgaatgttcttctgaaagtactttggatccaacaaaaaccatctgcatagaaaccatcaagggcacttgctggcagactgtcattgatgggcgatgtgagatcaacatcaatggagccaccttaaagtcccagtgctgctcctccctcggtgctgcgtggggaagcccgtgcaccctatgccaagttgatcccatatgtggtaaagggtactcaagaattaaaggaacacaatgtgaagatatagatgaatgtgaagtgttcccaggagtgtgtaaaaatggcctgtgtgttaacactagggggtcattcaagtgtcagtgtcccagtggaatgactttggatgccacaggaaggatctgtcttgatatccgcctggaaacctgcttcctgaggtacgaggacgaggagtgcaccctgcctattgctggccgccaccgcatggacgcctgctgctgctccgtcggggcagcctggggtactgaggaatgcgaggagtgtcccatgagaaatactcctgagtacgaggagctgtgtccgagaggacccggatttgccacaaaagaaattacaaatggaaagcctttcttcaaagatatcaatgagtgcaagatgatacccagcctctgcacccacggcaagtgcagaaacaccattggcagctttaagtgcaggtgtgacagcggctttgctcttgattctgaagaaaggaactgcacagacattgacgaatgccgcatatctcctgacctctgtggcagaggccagtgtgtgaacacccctggggactttgaatgcaagtgtgacgaaggctatgaaagtggattcatgatgatgaagaactgcatggatattgatgagtgtcagagagatcctctcctatgccgaggtggtgtttgccataacacagagggaagttaccgctgtgaatgcccgcctggccatcagctgtcccccaacatctccgcgtgtatcgacatcaatgaatgtgagctgagtgcacacctgtgccccaatggccgttgcgtgaacctcatagggaagtatcagtgtgcctgcaaccctggctaccattcaactcccgataggctattttgtgttgacattgatgaatgcagcataatgaatggtggttgtgaaaccttctgcacaaactctgaaggcagctatgaatgtagctgtcagccgggatttgcactaatgcctgaccagagatcatgcaccgacatcgatgagtgtgaagataatcccaatatctgtgatggtggtcagtgcacaaatatccctggagagtacaggtgcttgtgttatgatggattcatggcatctgaagacatgaagacttgtgtagatgtcaatgagtgtgacctgaatccaaatatctgcctaagtgggacctgtgaaaacacgaaaggctcatttatctgccactgtgatatgggctactccggcaaaaaaggaaaaactggctgtacagacatcaatgaatgtgaaattggagcacacaactgtggcaaacatgctgtatgtaccaatacagcaggaagcttcaaatgtagctgcagtcccgggtggattggagatggcattaagtgcactgatctggacgaatgttccaatggaacccatatgtgcagccagcatgcagactgcaagaataccatgggatcttaccgctgtctgtgcaaggaaggatacacaggtgatggcttcacttgtacagaccttgatgagtgctctgagaacctgaatctctgtggcaatggccagtgcctcaatgcaccaggaggataccgctgtgaatgcgacatgggcttcgtgcccagtgctgacgggaaagcctgtgaagatattgatgagtgctcccttccgaacatctgtgtctttggaacttgccacaacctccctggcctgttccgctgtgagtgtgagataggctacgaactggacagaagcggcgggaactgcacagatgtgaatgaatgcctggatccaaccacgtgcatcagtgggaactgtgtcaacactccaggcagctatatctgtgactgcccacctgattttgaactgaacccaactcgagttggctgtgttgatacccgctctggaaattgctatttggatattcgacctcgaggagacaatggagatacagcctgcagcaatgaaattggagttggtgtttccaaagcttcctgctgctgttctctgggtaaagcctggggtactccttgtgagatgtgtcctgctgtgaacacatccgagtacaaaattctttgtcctggaggggaaggtttccgaccaaatcctatcaccgttatattggaagatattgatgagtgccaggagctaccagggctgtgccaaggaggaaaatgtatcaacacctttgggagtttccagtgccgctgtccaaccggctactacctgaatgaagatacacgagtgtgtgatgatgtgaatgaatgtgagactcctggaatctgtggtccagggacatgttacaacaccgttggcaactacacctgtatctgtcctccagactacatgcaagtgaatgggggaaataattgcatggatatgagaagaagtttgtgctacagaaactactatgctgacaaccagacctgtgatggagaattgttattcaacatgaccaagaagatgtgctgctgttcctacaacattggccgggcgtggaacaagccctgtgaacagtgtcccatcccaagtacagatgagtttgctacactctgtggaagtcaaaggccaggctttgtcatcgacatttataccggtttacccgttgatattgatgagtgccgggagatcccaggggtctgtgaaaatggagtgtgtatcaacatggttggcagcttccgatgtgaatgtccagtgggattcttctataatgacaagttgttggtttgtgaagatattgacgagtgtcagaacggcccagtgtgccagcgcaacgccgaatgcatcaacactgcaggcagctaccgctgtgactgtaagcccggctaccgcttcacctccacaggacagtgcaatgatcgtaatgaatgtcaagaaatccccaatatatgcagtcatgggcagtgcattgacacagttggaagcttttattgcctttgccacactggttttaaaacaaatgatgaccaaaccatgtgcttggacataaatgaatgtgaaagagatgcctgtgggaatggaacttgccggaacacaattggttccttcaactgccgctgcaatcatggtttcatcctttctcacaacaatgactgtatagatgttgatgaatgtgcaagtggaaatgggaatctttgcagaaatggccaatgcattaatacagtggggtctttccagtgccagtgcaatgaaggctatgaggtggctccagatgggaggacctgtgtggatatcaatgaatgtcttctagaacccagaaaatgtgcaccaggtacctgtcaaaacttggatgggtcctacagatgcatttgcccacctggatacagtcttcaaaatgagaagtgtgaagatattgatgagtgtgtcgaagagccagaaatttgtgccctgggcacatgcagtaacactgaaggcagcttcaaatgtctgtgtccagaagggttttccttgtcctccagtggaagaaggtgccaagatttgcgaatgagctactgttatgcgaagtttgaaggaggaaagtgttcatcacccaaatccagaaatcactccaagcaggaatgctgctgtgccttgaagggagaaggctggggagacccctgcgagctctgccccacggaacctgatgaggccttccgccagatatgtccttatggaagtgggatcatcgtgggacctgatgattcagcagttgatatggacgaatgcaaagaacccgatgtctgtaaacatggacagtgcatcaatacagatggttcctatcgctgcgagtgtccctttggttatattctagcagggaatgaatgtgtagatactgatgaatgttctgttggcaatccttgtggaaatggaacctgcaagaatgtgattggaggttttgaatgcacctgcgaggagggatttgagcccggtccaatgatgacatgtgaagatataaatgaatgtgcccagaatcctctgctctgtgccttccgatgtgtgaacacttatgggtcatatgaatgcaaatgtcccgtgggatatgtgctcagagaagaccgtaggatgtgcaaagatgaggatgagtgtgaagagggaaaacatgactgtactgaaaaacaaatggaatgcaagaacctcattggcacatatatgtgcatctgtggacccgggtatcagcggagacctgatggagaaggctgtgtagatgagaatgaatgtcagacgaagccagggatctgtgagaatgggcgctgcctcaacacccgtgggagctacacctgtgagtgtaatgatgggtttaccgccagccccaaccaggacgagtgccttgacaatcgggaagggtactgcttcacagaggtgctacaaaacatgtgtcagatcggctccagcaacaggaaccccgtcaccaaatcggaatgctgctgtgacggagggagaggctggggtccccactgtgagatctgccctttccaggggactgtggctttcaagaaactctgtccccatggccgaggattcatgaccaatggagcagatatcgatgaatgcaaggttattcacgatgtttgccgaaatggggaatgtgtcaatgacagaggatcatatcattgcatttgtaaaactgggtacactccagatataactgggacttcctgtgtagatctgaacgagtgcaaccaggctcccaaaccctgcaattttatctgcaaaaacacagaagggagttaccagtgttcatgcccgaaaggctacattctgcaagaggatggaaggagctgcaaagatcttgatgagtgtgcaaccaagcaacacaactgccagttcctatgtgttaacaccattggcggcttcacatgcaaatgtcctcccggatttacccaacaccatacgtcctgcattgataacaatgaatgcacctctgacatcaatctgtgcgggtctaagggcatttgccagaacactcctggaagcttcacctgtgaatgccagcggggattctcacttgatcagaccggctccagctgtgaagacgtggacgagtgtgagggtaaccaccgctgccagcatggctgccagaacatcattgggggctacaggtgcagctgcccccagggctacctccagcactaccagtggaaccagtgtgttgatgaaaacgaatgcctcagcgctcacatctgcggaggagcctcctgtcacaacaccctggggagctacaagtgcatgtgtcccgccggcttccagtatgaacagttcagtggaggatgccaagacatcaatgaatgtggctctgcgcaggccccctgcagctatggctgttccaataccgagggcggttacctgtgtggctgtccacctggttacttccgcataggccaagggcactgtgtttctggaatgggcatgggccgaggaaacccagagccacctgtcagtggtgaaatggatgacaattcactctccccagaggcttgttacgagtgtaagatcaatggctaccccaaacggggcaggaaacggagaagcacaaacgaaactgatgcctccaatatcgaggatcagtctgagacagaagccaatgtgagtcttgcaagttgggatgttgagaagacagccatctttgctttcaatatttcccacgtcagtaacaaggttcgaatcctagaactccttccagctcttacaactctgacgaatcacaacagatacttgatcgaatctggaaatgaagatggcttctttaaaatcaaccaaaaggaagggatcagctacctccacttcacaaagaagaagccagtggctggaacctattcattacaaatcagtagtactccactttataaaaagaaagaacttaaccaactagaagacaaatatgacaaagactacctcagtggtgaactgggtgataatctgaagatgaaaatccaggttttgcttcattaattcaccatccagagaccaaataattaaaagaaaaacaaatatagataggtagaactatattttcccccaatcagaatcatcatatcataggtacaatctttcaccaagtaaatttgtataaataagcactattctttgtattaccaaagcaaggtacaggtgactaccctagttcaaaacaaccactttctcaggcttctcatgtgtgtagctaagctaccttgtcatatgtgttgattcttgaaaactgggacgtgtatttccattgggggttggccatttatgctgacatgccatccttccagcaaacgtacgggaatgtgctttcaattgatggactactctattttttgcaaatttgtaaactttgcttctccaaatacaagtactaggttgtccatttatggtacctatttggtgctagtaaattttcaaactagatttataaatgcactgtaatatgtacacaacttagaaaccaaattacaagtattcagttccaatacttcattaatttcaatcaaccaaagttagttcagtagcttatctcagttatgagtataatacattacatgtaaattaagtgtgtgtatactgtaatcgtgctattttttatcattgaaacatttataaactagaataataatgcccttaatgtgagggtttgtaatggtgcttattaagaccaaagacttgttaaatgtatacaccaagtggtaatgaaatttcggtgactggcccacacgtgcatagaggtctgggaggaccaggaaacagcctcagtggccagaggatcaccagtgcatccttcatcacagcatgtgcaatatgccaagattaccctcggtcattcctgtcaacaaggggtcaatgtcataaatgtcacaataaaacaatctcttcttttttttagtttaccccttggctttgtgttcttgcatggatttggggttggaggggccattccggaggctaaataaagtctcctggatttaaatta

SEQ ID NO: 390 - protein, 2871 aa, Homo sapiens
MRRGRLLEIALGFTVLLASYTSHGADANLEAGNVKETRASRAKRRGGGGHDALKGPNVCGSRYNAYCCPGWKTLPGGNQCIVPICRHSCGDGFCSRPNMCTCPSGQIAPSCGSRSIQHCNIRCMNGGSCSDDHCLCQKGYIGTHCGQPVCESGCLNGGRCVAPNRCACTYGFTGPQCERDYRTGPCFTVISNQMCQGQLSGIVCTKTLCCATVGRAWGHPCEMCPAQPHPCRRGFIPNIRTGACQDVDECQAIPGLCQGGNCINTVGSFECKCPAGHKLNEVSQKCEDIDECSTIPGICEGGECTNTVSSYFCKCPPGFYTSPDGTRCIDVRPGYCYTALTNGRCSNQLPQSITKMQCCCDAGRCWSPGVTVAPEMCPIRATEDFNKLCSVPMVIPGRPEYPPPPLGPIPPVLPVPPGFPPGPQIPVPRPPVEYLYPSREPPRVLPVNVTDYCQLVRYLCQNGRCIPTPGSCRCECNKGFQLDLRGECIDVDECEKNPCAGGECINNQGSYTCQCRAGYQSTLTRTECRDIDECLQNGRICNNGRCINTDGSFHCVCNAGFHVTRDGKNCEDMDECSIRNMCLNGMCINEDGSFKCICKPGFQLASDGRYCKDINECETPGICMNGRCVNTDGSYRCECFPGLAVGLDGRVCVDTHMRSTCYGGYKRGQCIKPLFGAVTKSECCCASTEYAFGEPCQPCPAQNSAEYQALCSSGPGMTSAGSDINECALDPDICPNGICENLRGTYKCICNSGYEVDSTGKNCVDINECVLNSLLCDNGQCRNTPGSFVCTCPKGFIYKPDLKTCEDIDECESSPCINGVCKNSPGSFICECSSESTLDPTKTICIETIKGTCWQTVIDGRCEININGATLKSQCCSSLGAAWGSPCTLCQVDPICGKGYSRIKGTQCEDIDECEVFPGVCKNGLCVNTRGSFKCQCPSGMTLDATGRICLDIRLETCFLRYEDEECTLPIAGRHRMDACCCSVGAAWGTEECEECPMRNTPEYEELCPRGPGFATKEITNGKPFFKDINECKMIPSLCTHGKCRNTIGSFKCRCDSGFALDSEERNCTDIDECRISPDLCGRGQCVNTPGDFECKCDEGYESGFMMMKNCMDIDECQRDPLLCRGGVCHNTEGSYRCECPPGHQLSPNISACIDINECELSAHLCPNGRCVNLIGKYQCACNPGYHSTPDRLFCVDIDECSIMNGGCETFCTNSEGSYECSCQPGFALMPDQRSCTDIDECEDNPNICDGGQCTNIPGEYRCLCYDGFMASEDMKTCVDVNECDLNPNICLSGTCENTKGSFICHCDMGYSGKKGKTGCTDINECEIGAHNCGKHAVCTNTAGSFKCSCSPGWIGDGIKCTDLDECSNGTHMCSQHADCKNTMGSYRCLCKEGYTGDGFTCTDLDECSENLNLCGNGQCLNAPGGYRCECDMGFVPSADGKACEDIDECSLPNICVFGTCHNLPGLFRCECEIGYELDRSGGNCTDVNECLDPTTCISGNCVNTPGSYICDCPPDFELNPTRVGCVDTRSGNCYLDIRPRGDNGDTACSNEIGVGVSKASCCCSLGKAWGTPCEMCPAVNTSEYKILCPGGEGFRPNPITVILEDIDECQELPGLCQGGKCINTFGSFQCRCPTGYYLNEDTRVCDDVNECETPGICGPGTCYNTVGNYTCICPPDYMQVNGGNNCMDMRRSLCYRNYYADNQTCDGELLFNMTKKMCCCSYNIGRAWNKPCEQCPIPSTDEFATLCGSQRPGFVIDIYTGLPVDIDECREIPGVCENGVCINMVGSFRCECPVGFFYNDKLLVCEDIDECQNGPVCQRNAECINTAGSYRCDCKPGYRFTSTGQCNDRNECQEIPNICSHGQCIDTVGSFYCLCHTGFKTNDDQTMCLDINECERDACGNGTCRNTIGSFNCRCNHGFILSHNNDCIDVDECASGNGNLCRNGQCINTVGSFQCQCNEGYEVAPDGRTCVDINECLLEPRKCAPGTCQNLDGSYRCICPPGYSLQNEKCEDIDECVEEPEICALGTCSNTEGSFKCLCPEGFSLSSSGRRCQDLRMSYCYAKFEGGKCSSPKSRNHSKQECCCALKGEGWGDPCELCPTEPDEAFRQICPYGSGIIVGPDDSAVDMDECKEPDVCKHGQCINTDGSYRCECPFGYILAGNECVDTDECSVGNPCGNGTCKNVIGGFECTCEEGFEPGPMMTCEDINECAQNPLLCAFRCVNTYGSYECKCPVGYVLREDRRMCKDEDECEEGKHDCTEKQMECKNLIGTYMCICGPGYQRRPDGEGCVDENECQTKPGICENGRCLNTRGSYTCECNDGFTASPNQDECLDNREGYCFTEVLQNMCQIGSSNRNPVTKSECCCDGGRGWGPHCEICPFQGTVAFKKLCPHGRGFMTNGADIDECKVIHDVCRNGECVNDRGSYHCICKTGYTPDITGTSCVDLNECNQAPKPCNFICKNTEGSYQCSCPKGYILQEDGRSCKDLDECATKQHNCQFLCVNTIGGFTCKCPPGFTQHHTSCIDNNECTSDINLCGSKGICQNTPGSFTCECQRGFSLDQTGSSCEDVDECEGNHRCQHGCQNIIGGYRCSCPQGYLQHYQWNQCVDENECLSAHICGGASCHNTLGSYKCMCPAGFQYEQFSGGCQDINECGSAQAPCSYGCSNTEGGYLCGCPPGYFRIGQGHCVSGMGMGRGNPEPPVSGEMDDNSLSPEACYECKINGYPKRGRKRRSTNETDASNIEDQSETEANVSLASWDVEKTAIFAFNISHVSNKVRILELLPALTTLTNHNRYLIESGNEDGFFKINQKEGISYLHFTKKKPVAGTYSLQISSTPLYKKKELNQLEDKYDKDYLSGELGDNLKMKIQVLLH

SEQ ID NO: 391 - DNA, 1134 bp, Homo sapiens
agcaactacagaaagcttttatttatttgttcaaagtaaccagtgctatggatgcaaaaaacccccaacaactcttccaacgctactttcaaaacaaacatatcaaacttgattttcattaggatgtagttattttgtcacactagtaaatcaaaatctaagacccaatttttatatatatatataaatatatataaaagaacaatgtgaacaattattgagcttcatcttctggacaagaatgccaagttagtctctcttcataaaaagcaattacaatttgaggacacttcatactttgcctctttcgccagcaccaagctctgcctcagtctgaatctttccatttcatgagaaacatcaattctccactgactgtctgtggcaccaattattctatcaggatcaagacctctggcaaatcctcttggtttgtcagcagcatctctttatcttctttgatttgctagtcatcagattcactgtcagataaagatgtctattatatgtaccatctagacacttatgccagctgtctgagagtgaagaaacgcttcaatcaattctggacaatctacatataccttcaggttcccaaagtatcgtcagcatctgtaaaatccgaacacattcagagaaatatacacttgccattcactacacgtcgatctagtactgatccacgacaaatactatcagctctgcgacaaaactactaacgtcattctccgtctggtacaaggccaactacctagacaaagtagaatatagatgggaggacaatgagaataggcggactgtagaagagctaggatacaacgaagtacgaactgacccagggtcacgagatagaaagagccagcgagacaagacagaaatacgggacatactgtcaggatcaacgccaacaggaatacttcgaaaagagtaggacatccacagctagcagagcagacacagacgcgccgacctggagcacagcttatcggcacagagagcaagcgcaatagagcgaataaaaataagggaagaagtaaggataggggccaagcacgaacacggcaccggacactaaccccaccgccgacgcagcacacacagcatagacagagagagagacagctcagtccgacc

SEQ ID NO: 392 - protein, 183 aa, Homo sapiens
MASNKTTLQKMGKKQNGKSKKVEEAEPEEFVVEKVLDRRVVNGKVEYFLKWKGFTDADNTWEPEENLDCPELIEAFLNSQKAGKEKDGTKRKSLSDSESDDSKSKKKRDAADKPRGFARGLDPERIIGATDSSGELMFLMKWKDSDEADLVLAKEANMKCPQIVIAFYEERLTWHSCPEDEAQ

SEQ ID NO: 393 - DNA, 772 bp, Homo sapiens
attcttgtaacgctccaccttacatgccacatctgtgtgagtcaacagggatcaggttggtcaccacacatgtctggagctgggcagcgtctgctctgtgttctgtgtggaatggagaaaaaaacgcctgccctgctgccttccatgttcataggcccagcccaagagagtgacacacagtgctggccctgagacatttccacaaagtggtcaactctgccttgcatcctaaaacttttgggcatctattttgaaaactataggagcctttggaaggcctcttatgtttggaggggaagggtgttgagattgtcaccatccttcaagctgagactcctggtgagcctttgccaccatgaaaaccacatagctgaccagggctgtgcttgaggtacagaggacacacattgtagacaggcctgtgtcatgtttccttacagtcgttttttacagagaaaaggggcattgttttttcactgctttctcaacagttcctgtgaataaatgaaacatttcggagctccctgagaaaaaaaaacagtacaacaaacacacctcacaaaacagaaaaagaatgggcgggccagccgggcccacgaaaaaagttcaaacccatccgtgggcccgggcccacaggtcaggaacgcggcaacgcggttcagggaacccggcacgacaggcgggttctcccaaaaaacgccggggcgaccggggctcggacacccagggggccgggcatacgggtcacacggggcagagacgaaactccggg

SEQ ID NO: 394 - protein, 269 aa, Homo sapiens
MAASAGAGAVIAAPDSRRWLWSVLAAALGLLTAGVSALEVYTPKEIFVANGTQGKLTCKFKSTSTTGGLTSVSWSFQPEGADTTVSFFHYSQGQVYLGNYPPFKDRISWAGDLDKKDASINIENMQFIHNGTYICDVKNPPDIVVQPGHIRLYVVEKENLPVFPVWVVVGIVTAVVLGLTLLISMILAVLYRRKNSKRDYTGCSTSESLSPVKQAPRKSPSDTEGLVKSLPSGSHQGPVIYAQLDHSGGHHSDKINKSESVVYADIRKN

SEQ ID NO: 395 - DNA, 713 bp, Homo sapiens
tcccagctgcgcgtcgcagtcccgacgcgagaagggctggagtcggcgtccagcctagagcccccggtgggagccaggccgggacgcgtgcaccatgccctacctgctcatcagcacccagatccgcatggaggtgggccccactatggtgggcgatgaacagtcggatccagagctgatgcagcatctgggggcttcaaagagaagagccttgggaaacaacttttatgaatactacgtcgatgaccctccccgcatagtcctggacaagctggaacgcaggggcttccgtgtgctgagcatgacgggggtgggccagacgctggtgtggtgtctgcacaaggagtgaccttctcatgctgatttgcagacggggcacccctgtggaggggctgctgtgggccctgacctccaagctcctgcctcaccgtctgccttgctcctctcttcccaaatcatcaccgccatgggcccagccccaaagggcagtgaatggccttctctgaaaccctgcgtcaagcagtgggagagggcagtgcccggtgccctggtgctcccagctgccctcctgcttcgggcctgggccgagggccttgtgtaggccatgttcctcgggcagctgccccgggccggagctgggcactccagcggccctggcgcgtggctcctgcatagctagcccaagccaataaagggctgtgatgagtggctgc

SEQ ID NO: 396 - protein, 84 aa, Homo sapiens
MPYLLISTQIRMEVGPTMVGDEQSDPELMQHLGASKRRALGNNFYEYYVDDPPRIVLDKLERRGFRVLSMTGVGQTLVWCLHKE

SEQ ID NO: 397 - DNA, 5629 bp, Homo sapiens
cttaagtgcaaggaactctgtgttgggaggaaaaatgtccttcttcaatttccgtaagatcttcaagttggggagcgagaagaagaagaagcagtacgaacacgtgaagagggacctgaaccccgaagacttttgggagattataggagaactgggcgacggagcctttgggaaagtgtacaaggcccagaataaagagaccagtgttttagctgctgcaaaagtgattgacactaaatctgaagaagaacttgaagattacatggtagagattgacatattagcatcttgtgatcacccaaatatagtcaagcttctagatgccttctattatgagaacaatctttggatcctcattgaattttgtgcaggtggagcagtagatgctgtgatgcttgaacttgagagaccattaactgagtcccaaatacaagtagtttgcaagcagactttagatgcattgaactacttacatgataataagatcatccacagagatctgaaggctggcaacattctctttaccttagatggagatatcaaattggcggattttggagtatcagctaaaaacacgaggacaattcaaagaagagattcctttattggtacaccatattggatggctcctgaagtagtcatgtgtgaaacatctaaggacagaccctatgactacaaagctgatgtttggtccctgggtatcactttaatagaaatggctgagatagaaccacctcatcatgaattaaatccaatgcgagtgctgctaaaaatagcaaaatctgagccacctacattagcacagccatccagatggtcttcaaattttaaggactttctaaagaaatgcttagaaaagaatgtggatgccaggtggactacatctcagctgctgcagcatccctttgttactgttgattccaacaaacccatccgagaattgattgcagaggcgaaggctgaagtaacagaagaagttgaagatggcaaagaggaagatgaagaggaggaaacagaaaattctctgccaatacctgcaagtaagcgtgcatcttctgaccttagtatcgccagctctgaagaagataaactttcacaaaatgcttgtattttggagtctgtctcagaaaaaacagaacgtagtaactctgaagataaactcaacagcaaaattcttaatgaaaaacccaccactgatgaacctgaaaaggctgtggaggatattaatgaacatattaccgatgctcagttagaagcaatgactgaactccatgacagaacagcagtaatcaaggagaatgaaagagagaagaggcccaagcttgaaaatctgcctgacacagaagaccaagaaactgtggacattaattcagtcagtgaaggaaaagagaataatataatgataaccttagaaacaaatattgaacataatctaaaatctgaggaagaaaaggatcaggaaaagcaacagatgtttgaaaataagcttataaaatctgaagaaattaaagatactattttgcaaacagtagatttagtttctcaagagactggagaaaaagaggcaaatattcaggcagttgatagtgaagttgggcttacaaaggaagacacccaagagaaattgggggaagacgacaaaactcaaaaagatgtgatcagcaatacaagtgatgtgataggaacatgtgaggcagcagatgtggctcagaaagtggatgaagacagtgctgaggatacgcagagtaatgatgggaaagaagtggtcgaagtaggccagaaattaattaataagcccatggtgggtcctgaggctggtggtactaaggaagttcctattaaagaaatagttgaaatgaatgaaatagaagaaggtaaaaataaggaacaagcaataaacagttcagagaacataatggacatcaatgaggaaccaggaacaactgaaggtgaagaaatcactgagtcaagtagcactgaagaaatggaggtcagaagtgtggtggctgatactgaccaaaaggctttaggaagtgaagttcaggatgcttctaaagtcactactcagatagataaagagaaaaaagaaattccagtgtcaattaaaaaagagcctgaagttactgtagtttcacagcccactgaacctcagcctgttctaatacccagtattaatatcaactctgacagtggagaaaataaagaagaaataggttctttatcaaaaactgaaactattctgccaccagaatctgagaatccaaaggaaaatgataatgattcaggcactggttccactgctgatactagcagtattgacttgaatttatccatctctagctttctaagtaaaactaaagacagtggatcgatatctttacaagaaacaagaagacaaaagaaaacattgaagaaaacacgcaaatttattgttgatggtgtagaagtgagtgtaacaacatcaaagatagttacagatagtgattccaaaactgaagaattgcggtttcttagacgtcaggaacttcgggaattaagatttcttcagaaagaagagcaaagagcccaacaacagctcaatagcaaactacagcaacaacgagaacaaattttccggcgctttgagcaggaaatgatgagtaaaaagcgacaatatgaccaggaaattgagaatctagaaaaacagcagaaacagactatcgaacgcctggaacaagagcacacaaatcgcttgcgagatgaagccaaacgcatcaaaggagaacaagagaaagagttgtccaaatttcagaatatgctgaagaaccgaaagaaggaggttataaatgaagtggagaaagcacccaaagagctgagaaaagagctcatgaaacgcaggaaagaggagcttgcacaaagccagcatgctcaggaacaagagtttgttcagaaacaacagcaagaattagatggctctctgaaaaagatcatccagcagcagaaggcagagttagctaatattgagagagagtgcctgaataacaagcaacagctcatgagagctcgagaagctgcaatttgggagctcgaagaacgacacttacaagaaaaacaccagctgctcaaacagcagcttaaagatcagtatttcatgcaaagacatcagctacttaagcgccacgagaaggaaacagagcaaatgcagcgttacaatcaaagacttattgaggaattgaaaaacagacagactcaagaaagagcaagactgcccaagattcagcgcagtgaagccaagactcgaatggccatgtttaagaagagtttgagaattaactcaacagccacaccagatcaggaccgtgataaaattaaacagtttgctgcacaagaagaaaagaggcagaaaaatgagagaatggctcagcatcagaaacatgagaatcaaatgcgagatcttcagttgcagtgtgaagccaatgtccgcgaactgcatcagctgcagaatgaaaaatgccacttgttggttgagcatgagactcagaaactgaaggagttagatgaggaacatagccaagaattaaaggagtggagagagaaattgagacctaggaaaaagacactggaagaagagtttgccaggaaactacaggaacaggaagtattctttaaaatgactggggagtctgaatgccttaacccatcaacacagagccggatttccaaattttatcctattcccagcttgcattccaccggatcataacaaagggaagcattctgtgcgtgggtttggctctttcagtatgtcattctgttctcatcttctgccacagtctctcagatagctcatgaagacaatcacctgcctcaccttctaggtgttttccttttttgttttttttgttttgttttgtttttaagcaaagatgaagggaaaacgaactaagacagacgctaggccatgttggcaaagtagcatcttggtgactaaggtgactttgtatattcatcttaaaaattatgttctttagacactgctacctgaaaactgttggagaaataatgtttaaagttatttaagaaaaactgttacatcactaagtattaataaattcttcttacctgacgtaacttctcaatgcctaaattctgtagttgaagctctgctgcagagagttgggataattttcttttggtggatcagctctcataaaaaagctatgatttgctcaaatatgctgttgactcagtaaatgaatatatttttttctttaaataggaacaacctcttttaaaagagaaaaattatttcagtgatttgtcaaaacgaattacctcttttggcatgagctaataattgagggtgctaattttcttaagatagtgcctaaaacactaaatttcagtcaagtcgtaagtaggattttctttttgatcaacagggacaaaaacatctttagaattaaaaacatggttgttttggaatttttgcttctcttaccgtttgatagaaattttcatcctaaaatacatgtacaaagtttggaaagatgaaaaaaagaggtagcttttagattgcaaattggaaatgtaaaactcatgaaatttaagcaatataggtttagctatctgtgtttattttctaaaataatacctgagctggttaaatgatttctctccatcttagctaattctgtttaaaactctgtcagaggcctgcaggctgtgagttatatttataaatatatcttcagaaattaatcttaaaagaggcattagttcagaatacttttttaaaagtttaaattaaatatttaggcacgtcagaaattacttttccttattttgaaatgaggctacttatgtcttggttttattttgttccatgtttaaatcattcactttgatttgagtgggaaaagcctgaagcctttatcatgtggttgctggtgtgtgtaattattaatgaaatgttcactcctagtcccttatgaggcttagaatttcaaccacgtgtcaggtcagacagtattataaactgtactttgctgtctgagacagcacatttgtgaatgatgcttgctgcctgccattttcaacctattctctcttaagagtgctaggtaccaaattgtgaaagtttgttttcagttatattacttttgaggctggtgaaaaatttaaatgtaactttgtgggaacactgattcatatttagaaaatgtaaatgtctgtagcactttcttgcagttaatttgaaaactttggatgctgaaccttgtttgtcagtgatttagatgatttaaaaatgcatgtgtgatttgaattttataattgttttgacaagcataatttacttggacaacttcgtaggtagccttaacttctggccaagtttgttttttatataaatatatatacatatatacatattatgtatggttgtaaattcatacacttatcacatgaatgtgttactgtatacaaaactcttaatgctttattctcaaatgctgggttgaaaaatgttttgaaagccttttaaaatatatatctttataaagtaatattcaggatgatgataaaaattgtttatattgttatgataaaaatgacagtataatgttaaaaaaaaaaaaaaaaaaaaaaa

SEQ ID NO: 398 - protein, 1235 aa, Homo sapiens
MSFFNFRKIFKLGSEKKKKQYEHVKRDLNPEDFWEIIGELGDGAFGKVYKAQNKETSVLAAAKVIDTKSEEELEDYMVEIDILASCDHPNIVKLLDAFYYENNLWILIEFCAGGAVDAVMLELERPLTESQIQVVCKQTLDALNYLHDNKIIHRDLKAGNILFTLDGDIKLADFGVSAKNTRTIQRRDSFIGTPYWMAPEVVMCETSKDRPYDYKADVWSLGITLIEMAEIEPPHHELNPMRVLLKIAKSEPPTLAQPSRWSSNFKDFLKKCLEKNVDARWTTSQLLQHPFVTVDSNKPIRELIAEAKAEVTEEVEDGKEEDEEEETENSLPIPASKRASSDLSIASSEEDKLSQNACILESVSEKTERSNSEDKLNSKILNEKPTTDEPEKAVEDINEHITDAQLEAMTELHDRTAVIKENEREKRPKLENLPDTEDQETVDINSVSEGKENNIMITLETNIEHNLKSEEEKDQEKQQMFENKLIKSEEIKDTILQTVDLVSQETGEKEANIQAVDSEVGLTKEDTQEKLGEDDKTQKDVISNTSDVIGTCEAADVAQKVDEDSAEDTQSNDGKEVVEVGQKLINKPMVGPEAGGTKEVPIKEIVEMNEIEEGKNKEQAINSSENIMDINEEPGTTEGEEITESSSTEEMEVRSVVADTDQKALGSEVQDASKVTTQIDKEKKEIPVSIKKEPEVTVVSQPTEPQPVLIPSININSDSGENKEEIGSLSKTETILPPESENPKENDNDSGTGSTADTSSIDLNLSISSFLSKTKDSGSISLQETRRQKKTLKKTRKFIVDGVEVSVTTSKIVTDSDSKTEELRFLRRQELRELRFLQKEEQRAQQQLNSKLQQQREQIFRRFEQEMMSKKRQYDQEIENLEKQQKQTIERLEQEHTNRLRDEAKRIKGEQEKELSKFQNMLKNRKKEVINEVEKAPKELRKELMKRRKEELAQSQHAQEQEFVQKQQQELDGSLKKIIQQQKAELANIERECLNNKQQLMRAREAAIWELEERHLQEKHQLLKQQLKDQYFMQRHQLLKRHEKETEQMQRYNQRLIEELKNRQTQERARLPKIQRSEAKTRMAMFKKSLRINSTATPDQDRDKIKQFAAQEEKRQKNERMAQHQKHENQMRDLQLQCEANVRELHQLQNEKCHLLVEHETQKLKELDEEHSQELKEWREKLRPRKKTLEEEFARKLQEQEVFFKMTGESECLNPSTQSRISKFYPIPSLHSTGS

SEQ ID NO: 399 - DNA, 9009 bp, Homo sapiens
cctaaagaaaagtattaagtaaatagcagtacagatggcaaatggattgcacaatatatcctctggatccatagtgaccctgcagagataaacctgtgatggtcaaacaatgtgaaaactgctgtcagagacatgggcagggtgctcttgtttacagagaagaggtgcaaaaatcaacttgatggtagtgggaagatcaggaaatgcttcctgaaattgagtattaagaactaatagacattaggtggttgcagaataagttttgtttaggaaggacaagcagttgggtatgactggcttctaggttgtgtgttgtggagtgactggggataaaagcaggagcaagatcacaaaaggtcttctatgcttatattagggaagttggactttattctcaagctgaagggaagctgttgcatggttttaagcagtaaagtgatatgatcagagttttagaggatgccaagattgaaggcaagtctgaccagttaggagactgcttgttaaattagttcagaggagaaacagtgaaggcagtggcactgggcatgaagaagtatatgtgtgctaattttagatttcttagggaagcagaaatgacaagagttagtggtccattggacagaaatattgaaggagactggggagtctaggttgactcccagggtttaggtttgggcagtaaaatgacatgtagaacaattaactgataaacagcatacagaaagaggaaagaacttcatttcatatgtttgtttttgaggaaaagatgtttgtttttgaacttcctgattcagaggggcttgtgggacatcttggttaagatcctgtagtagttctagtagggtctagaagtcaagagatacaaccccgcctggaaggatttgggagtcttcagcatttggaattttggaagccattgtttactgcagtgcatatgagataatttaaactggtacatagataaacacttgaaaaaattttaatagataggaatttaatgtgtatgagaaacataacttgcacatctaacctttgataatcatggacattatcacttaggccaagtgagctcaataaaagggaaatattaactaaaaatatatgtgatacatggaaatggcaaaaatcacggtgaagctatgcaaacgatgcaagttcagaaagtgctgtgttaagtcatgggtgtggtggataaattcacccaaggagagagtaagagtgagaagaaaagagagttgacattgggtggcggggaatggagaagaagaacccatgaaggaaactgaggaagagcagccagacgaataggaggaaaaccaggagaagatggtctttggagtccaaatgaagagttctgaggaggaagtggtccacagcgtcaaacttgtgcaccatggacaattttgctgagggagatttcactgtggcggattatgccttgttagaagattgccctcacgtggatgattgtgtctttgctgctgaatttatgagcaatgattatgttcgtgtgactcagctttactgtgatggggtgggtgtgcaatataaagattatatccaaagtgagaggaatttggaatttgacatctgcagtatatggtgtagtaaaccaatttctgtcctgcaagattattgcgatgccattaaaataaacatcttctggccacttctgtttcaacatcaaaacagttccgtaatatcacgattgcatccctgtgtggacgccaacaattcacgtgcttctgagataaatttgaagaaactacaacatcttgagttgatggaagatattgtggatttggcaaagaaagttgctaatgattcattccttattggaggcttattgagaattggttgtaaaatagaaaataaaatcttggcaatggaagaagctctgaattggataaaatatgcaggcgatgtaacaattctaactaaattaggatcaattgacaattgttggcctatgttaagtattttctttactgaatacaagtaccacataactaaaattgtaatggaagactgcaatttgcttgaagaacttaaaactcaaagttgtatggattgtatagaggaaggagaactaatgaaaatgaaaggaaatgaagagttttccaaagaaagatttgatatagctattatctattacaccagagccattgaatatagacctgaaaactaccttctttatggtaaccgagctctttgttttcttcgtactggacagtttagaaatgcactcggtgatggaaagagagccactattctgaagaacacttggccaaagggtcattatcgttattgtgatgctctttctatgctgggggaatatgactgggccctgcaagcaaacataaaagctcaaaaactctgtaaaaatgaccctgagggaatcaaggatctaattcagcagcatgtaaagttacaaaaacaaatagaagacctacaaggtcgaacagcaaataaggatccaattaaagccttttatgaaaacagggcctacacacctaggagtttatcagcacctatatttactacttcacttaactttgtggagaaggaaagagatttcagaaaaattaatcacgaaatggccaacggtggtaatcagaatctaaaggtggcggatgaggcgttgaaggtagatgattgtgactgtcatcctgaattttcaccaccatcaagtcagcctccaaaacataaaggaaaacaaaaatctcgaaacaatgaatcagaaaagttcagttctagttcaccattgactttaccagcagatttgaagaacatcttggagaaacagttttctaaatcttccagagctgcacaccaggattttgctaatataatgaaaatgctgagaagcttaattcaagatggctatatggccttattggagcagcgttgccgcagcgctgcacaggcctttacagagttgctgaacggtttagatcctcaaaaaataaagcaattgaacctggccatgattaactatgttttggtcgtctatggacttgccatttctctccttggaataggacagcctgaggaattatctgaagccgaaaaccagtttaagaggattattgaacactaccccagtgagggccttgattgcttggcctactgtggaattggaaaagtgtatttgaaaaaaaacagatttctagaagctctcaatcactttgagaaagcaagaaccttgatttatcgtcttcctggagtgttaacttggcccacgagtaatgtgattattgaagagtctcagccacaaaaaataaagatgctgttagagaaatttgttgaagaatgcaagttccctccagtgccagatgccatttgttgctatcagaagtgccatggatattctaagatccagatatacataactgatccagactttaagggttttatacgcatcagctgttgccagtactgtaaaatagaatttcacatgaattgctggaagaagttaaaaactacaacctttaatgataaaattgacaaggattttctacaaggaatatgtcttacccctgactgtgaaggtgtcatttctaagattatcatcttcagcagtggtggtgaagttaaatgtgaatttgaacacaaggtcataaaagaaaaggttcctccaagacctattctgaaacagaaatgttctagcctagagaaactaagactgaaagaagacaaaaaattgaagagaaagatccaaaaaaaagaagcaaaaaagttagcacaagaaagaatggaggaggacttaagagaaagtaatccacccaaaaatgaagagcagaaagaaactgtagacaatgttcagcgttgtcagttccttgatgacagaattctacagtgtataaagcagtatgctgacaagattaaatccggcatacagaatacagccatgcttctcaaagaattgctttcttggaaagttttgagcacagaagactatacaacctgtttttctagcagaaattttctaaatgaagcagtggactatgttattcgccacttgattcaagaaaataacagagtaaagacaagaatatttctgcatgttttgagtgagcttaaagaagtggagcccaaattagccgcctggatccaaaaacttaatagctttggcttagatgccacaggaactttcttttctcgttatggagcatctcttaaactgcttgattttagtatcatgactttcctctggaatgagaaatatggtcacaaactagactctatagaaggaaagcaacttgattatttctctgagccagcatcattgaaggaagcccgttgtttaatatggctgctagaagaacacagagacaagttcccagcattgcatagtgctttagatgaattctttgatataatggacagccgctgtactgtgttaaggaaacaagatagtggtgaagcaccgtttagttcaaccaaggtgaaaaacaaaagcaagaaaaagaagccaaaggattcaaagcctatgttagttgggtctggaacaacttcagtaacttcaaataatgagatcatcacttcaagtgaagaccatagcaatcgaaattcagattctgcaggcccatttgcagtgcctgaccatcttcggcaagatgtagaagaattcgaagctctctatgaccaacacagtaacgaatatgttgtccgcaataagaagctatgggacatgaacccaaaacaaaaatgttcaactctatatgattacttctctcagtttttggaggaacatggtcccttggacatgagtaacaagatgttctctgcagaatatgagtttttcccagaagaaactcgacagatactagaaaaagcaggaggtttaaaaccttttctcttgggatgccctcgttttgttgtgattgacaactgtattgcactgaagaaggttgcatcacggctcaagaaaaaaaggaagaagaaaaacattaaaacaaaagtagaagaaatttcaaaagcaggggagtatgtacgagttaaactacaactgaatccagctgctagggaatttaaaccagatgtaaagtctaaaccagtgtcagattcatcttcagcaccagcttttgaaaatgtgaaacccaaacctgtgtctgcaaattctcccaagccagcttgtgaagatgtgaaggccaaaccagtatccgacaattcttctagacaagtttctgaggatgggcaacccaaaggggtctcttctaattctcctaaaccaggctctgaggatgcaaattacaagcgagtctcctgtaattcccccaaaccggttcttgaggatgtgaaaccaacttattgggctcaatcccatttggtcacaggatactgtacgtatcttcctttccagagatttgatatcacccagacaccgccagcatacataaacgtgttaccaggtttgccccagtacaccagcatatatacacccttggccagcctttctcctgaatatcagctaccaagatcagtaccagtggtgccgtcttttgtagccaatgacagagcagataaaaatgctgctgcctattttgagggtcatcatttgaatgctgagaatgttgctggtcaccagattgcctctgaaacacagatccttgagggctctttgggaatatctgtaaagtcacactgcagcacaggtgatgctcatacagtcctgagtgagtctaacagaaatgatgagcactgtggaaattctaacaacaaatgtgaagtaattccagaaagcaccagtgcagtaacaaacattccacacgtgcagatggttgccatacaggtatcttggaacataatacaccaagaagtcaatactgagccatataatccttttgaggaacgacaaggggaaatttcacggattgaaaaggagcaccaagtattacaagaccaacttcaagaagtgtatgaaaattatgagcagataaaacttaagggcttagaagagaccagggacctggaagagaagttgaaaaggcacttagaagaaaacaagatctcaaagacggaattagattggttccttcaagatttggaaagagaaattaaaaaatggcaacaggaaaaaaaagaaatccaagaaagactaaaatcactgaagaagaaaattaaaaaggtttcaaatgccagtgaaatgtatacccagaaaaatgatggaaaggaaaaggaacatgaattacatctggatcagtcccttgaaatcagcaacacacttacaaatgagaaaatgaaaatagaagagtatataaagaaagggaaagaggattatgaagagagtcatcagagagctgtggctgcagaggtatccgtacttgaaaactggaaggagagtgaagtgtataagctacagatcatggagtcacaagcagaagcctttctgaagaagctggggctgattagccgtgatcctgcagcatatcctgacatggagtctgatatacgttcatgggaattgtttctttctaatgttacaaaagaaattgagaaagcaaagtctcagtttgaagaacaaattaaggcaattaaaaatggttctcggctcagtgaactttctaaagtgcagatttctgagctttcatttcctgcctgtaacacggttcatcccgagttactccctgagtcttcaggccacgatggccaagggcttgtgacttctgcaagcgacgtgactggaaaccacgcagcacttcacagggatcctagtgtgttctctgctggtgattccccaggggaggctccttctgcgctgttgccagggccaccccctggtcagcctgaagccactcagctgacagggccaaaacgggctggccaggcagctctgtcagaacgaagccctgtggctgatcggaagcagcctgttcctccaggacgtgctgcgcgttcaagccagtctccaaaaaagccgttcaatagtattattgagcacctgtcagtggtattcccatgttacaacagcactgagcttgctggttttattaaaaaagtgcgaagcaaaaacaagaactcactctcaggattgagtattgatgaaattgtccaaagagtgacagaacacattctagatgaacagaaaaagaaaaagccaaacccaggaaaggacaagaggacttatgagcccagctctgccacccccgtgaccaggtcctcccagggctcaccctcggtggttgttgcaccatcacccaaaaccaaggggcagaaagcagaagatgtccctgtgaggattgcactgggtgcaagttcctgtgaaatatgccacgaggtgttcaaatcaaaaaacgtgcgtgtgctcaaatgtgggcacaagtatcacaaagggtgctttaagcagtggcttaaagggcagagcgcttgcccggcctgccagggtcgtgatctcctgacagaagagtcaccttctggaagaggctggcccagtcagaatcaggagctgccttcctgctcttctaggtagtcacacttcactaaagtgtcatccaccagtgtgttgaatccgaagaatgacaattttctaccactggtgtaaaaaacaaacatttgaagacccttgtgcattgtgtgtcacaaagctaaatacatggaaatcgttaatatcgctgatattaagtaatttccccactctgagtgaatactttgatgattgccaacagtggctaataaaatgacggctaccacactcatgggtcactgggctgcgcagggctctttgaggtgggtggcttcttttggaaagtactatgaacgtctcgaagcagtattctagtgataagaattcttaacatagccaagcgccccacgtttgttccccacgtttgttccccttttctgtttgaaaaacctgttctggtagctccacaagagagatgatactgactttttaaattttttacaagagtctgtattcctgatatgcctatatttttcctcaaagattctgcattttaaggatgggcataagcaaactatattttaataatttatagttaatgttaaaatattggctgatttagaccaaaagattcaaatctcctctttgtgaaatcccatctgcatttgattttttattattttatgttcccccgttagattgttttaagtgtttgcttttcatcttttatagatgtaatctgattttcaaaaatcattaacactttttaattagtatcgactaagactttttccccctggaatcgaggctgtgtgtccgtcatcccagcccccggttggagcctgctctttgaactccgctgccttccttagcagcttctgtcctcttctgtgagtcagtcagcgagtgcttgggatccgcatccagccgtgctgagcacacaacaggctgtgtgtggaaatggccaccaccattctccttccccaccccaccacaaaaagagaagctgtgtctttagacaaccctgaggtatctgtgttacaatcgttctgtgtttgatatttgtgtaaagtatgcatgcagtcttgtactgtgacctaagaacaaaactgtaactgcattagaaaccatgaaaaaattagatattgttttgtgacttttagacagtggtaaatatagaaccatgaattctggtcacattccatttctctccaacatgaaggatcaaaaaatgtttttcaatgtgttctttgttccactgggaaacttagagtcatgagtttatgaggctggatttgggcacctttcctttgcctttggttcactgtgagttctgatgtcctagtgacttaggtcttagaagctcacgccttagtttgaaacagattctccacggtggtccccaaaacactgtctgcatatccataagaattgaacgctatgggtgttaacgtgcatgaggatcagtttgcagcagcaagtacaaaaggagaagaggaacatccgttgaatgagtgtgttttgtacataacttcagatacttgtgaacatgccttatatttgtccaacaactgtcagaataaagaacattctaaaatgag

SEQ ID NO: 400 - protein, 2025 aa, Homo sapiens
MDNFAEGDFTVADYALLEDCPHVDDCVFAAEFMSNDYVRVTQLYCDGVGVQYKDYIQSERNLEFDICSIWCSKPISVLQDYCDAIKINIFWPLLFQHQNSSVISRLHPCVDANNSRASEINLKKLQHLELMEDIVDLAKKVANDSFLIGGLLRIGCKIENKILAMEEALNWIKYAGDVTILTKLGSIDNCWPMLSIFFTEYKYHITKIVMEDCNLLEELKTQSCMDCIEEGELMKMKGNEEFSKERFDIAIIYYTRAIEYRPENYLLYGNRALCFLRTGQFRNALGDGKRATILKNTWPKGHYRYCDALSMLGEYDWALQANIKAQKLCKNDPEGIKDLIQQHVKLQKQIEDLQGRTANKDPIKAFYENRAYTPRSLSAPIFTTSLNFVEKERDFRKINHEMANGGNQNLKVADEALKVDDCDCHPEFSPPSSQPPKHKGKQKSRNNESEKFSSSSPLTLPADLKNILEKQFSKSSRAAHQDFANIMKMLRSLIQDGYMALLEQRCRSAAQAFTELLNGLDPQKIKQLNLAMINYVLVVYGLAISLLGIGQPEELSEAENQFKRIIEHYPSEGLDCLAYCGIGKVYLKKNRFLEALNHFEKARTLIYRLPGVLTWPTSNVIIEESQPQKIKMLLEKFVEECKFPPVPDAICCYQKCHGYSKIQIYITDPDFKGFIRISCCQYCKIEFHMNCWKKLKTTTFNDKIDKDFLQGICLTPDCEGVISKIIIFSSGGEVKCEFEHKVIKEKVPPRPILKQKCSSLEKLRLKEDKKLKRKIQKKEAKKLAQERMEEDLRESNPPKNEEQKETVDNVQRCQFLDDRILQCIKQYADKIKSGIQNTAMLLKELLSWKVLSTEDYTTCFSSRNFLNEAVDYVIRHLIQENNRVKTRIFLHVLSELKEVEPKLAAWIQKLNSFGLDATGTFFSRYGASLKLLDFSIMTFLWNEKYGHKLDSIEGKQLDYFSEPASLKEARCLIWLLEEHRDKFPALHSALDEFFDIMDSRCTVLRKQDSGEAPFSSTKVKNKSKKKKPKDSKPMLVGSGTTSVTSNNEIITSSEDHSNRNSDSAGPFAVPDHLRQDVEEFEALYDQHSNEYVVRNKKLWDMNPKQKCSTLYDYFSQFLEEHGPLDMSNKMFSAEYEFFPEETRQILEKAGGLKPFLLGCPRFVVIDNCIALKKVASRLKKKRKKKNIKTKVEEISKAGEYVRVKLQLNPAAREFKPDVKSKPVSDSSSAPAFENVKPKPVSANSPKPACEDVKAKPVSDNSSRQVSEDGQPKGVSSNSPKPGSEDANYKRVSCNSPKPVLEDVKPTYWAQSHLVTGYCTYLPFQRFDITQTPPAYINVLPGLPQYTSIYTPLASLSPEYQLPRSVPVVPSFVANDRADKNAAAYFEGHHLNAENVAGHQIASETQILEGSLGISVKSHCSTGDAHTVLSESNRNDEHCGNSNNKCEVIPESTSAVTNIPHVQMVAIQVSWNIIHQEVNTEPYNPFEERQGEISRIEKEHQVLQDQLQEVYENYEQIKLKGLEETRDLEEKLKRHLEENKISKTELDWFLQDLEREIKKWQQEKKEIQERLKSLKKKIKKVSNASEMYTQKNDGKEKEHELHLDQSLEISNTLTNEKMKIEEYIKKGKEDYEESHQRAVAAEVSVLENWKESEVYKLQIMESQAEAFLKKLGLISRDPAAYPDMESDIRSWELFLSNVTKEIEKAKSQFEEQIKAIKNGSRLSELSKVQISELSFPACNTVHPELLPESSGHDGQGLVTSASDVTGNHAALHRDPSVFSAGDSPGEAPSALLPGPPPGQPEATQLTGPKRAGQAALSERSPVADRKQPVPPGRAARSSQSPKKPFNSIIEHLSVVFPCYNSTELAGFIKKVRSKNKNSLSGLSIDEIVQRVTEHILDEQKKKKPNPGKDKRTYEPSSATPVTRSSQGSPSVVVAPSPKTKGQKAEDVPVRIALGASSCEICHEVFKSKNVRVLKCGHKYHKGCFKQWLKGQSACPACQGRDLLTEESPSGRGWPSQNQELPSCSSR

We claim:

1. A method for providing a patient diagnosis for lung cancer, comprising the steps of:
(a) determining the level of expression of one or more genes or gene products in a first biological sample taken from the patient;
(b) determining the level of expression of one or more genes or gene products in at least a second biological sample taken from a normal patient sample; and
(c) comparing the level of expression of one or more genes or gene products in the first biological sample with the level of expression of one or more genes or gene products in the second biological sample;
wherein a change in the level of expression of one or more genes or gene products in the first biological sample compared to the level of expression of one or more genes or gene products in the second biological sample is a diagnostic of the disease.

2. The method of claim 1, wherein one or more genes are selected from the group consisting of SEQ ID NOs: 1, 3, 5, 7, 9, 11, 13, 15, 17, 19, 21, 23, 25, 27, 29, 31, 33, 35, 37, 39, 41, 43, 45, 47, 49, 51, 53, 55, 57, 59, 61, 63, 65, 67, 69, 71, 73, 74, 76, 78, 80, 82, 84, 86, 88, 90, 92, 94, 96, 98, 100, 102, 104, 106, 108, 110, 112, 114, 116, 118, 120, 122, 124, 126, 128, 130, 132, 134, 136, 138, 140, 142, 144, 146, 148, 150, 152, 154, 156, 158, 160, 162, 164, 166, 168, 170, 172, 174, 176, 178, 180, 182, 184, 186, 188, 190, 192, 194, 196, 198, 200, 202, 204, 206, 208, 210, 212, 214, 216, 218, 220, 222, 224, 226, 228, 230, 232, 234, 236, 238, 240, 242, 244, 246, 248, 250, 252, 254, 256, 258, 260, 262, 264, 266, 268, 270, 272, 274, 276, 278, 280, 282, 284, 286, 288, 290, 292, 294, 296, 298, 300, 302, 304, 306, 308, 310, 312, 314, 316, 318, 320, 322, 324, 326, 328, 330, 332, 334, 336, 338, 340, 342, 344, 346, 348, 350, 353, 355, 357, 359, 361, 363, 365, 367, 369, 371, 373, 375, 377, 379, 381, 383, 385, 387, 389, 391, 393, 395, 397, and 399.

3. The method of claim 1, wherein one or more gene products are polypeptides selected from the group consisting of SEQ ID NOs: 2, 4, 6, 8, 10, 12, 14, 16, 18, 20, 22, 24, 26, 28, 30, 32, 34, 36, 38, 40, 42, 44, 46, 48, 50, 52, 54, 56, 58, 60, 62, 64, 66, 68, 70, 72, 75, 77, 79, 81, 83, 85, 87, 89, 91, 93, 95, 97, 99, 101, 103, 105, 107, 109, 111, 113, 115, 117, 119, 121, 123, 125, 127, 129, 131, 133, 135, 137, 139, 141, 143, 145, 147, 149, 151, 153, 155, 157, 159, 161, 163, 165, 167, 169, 171, 173, 175, 177, 179, 181, 183, 185, 187, 189, 191, 193, 195, 197, 199, 201, 203, 205, 207, 209, 211, 213, 215, 217, 219, 221, 223, 225, 227, 229, 231, 233, 235, 237, 239, 241, 243, 245, 247, 249, 251, 253, 255, 257, 259, 261, 263, 265, 267, 269, 271, 273, 275, 277, 279, 281, 283, 285, 287, 289, 291, 293, 295, 297, 299, 301, 303, 305, 307, 309, 311, 313, 315, 317, 319, 321, 323, 325, 327, 329, 331, 333, 335, 337, 339, 341, 343, 345, 347, 349, 351, 352, 354, 356, 358, 360, 362, 364, 366, 368, 370, 372, 374, 376, 378, 380, 382, 384, 386, 388, 390, 392, 394, 369, 398, and 400.

4. A method for distinguishing between normal and disease tissues, comprising the steps of:
(a) determining the level of expression of one or more genes or gene products in a first biological sample of a disease tissue;
(b) determining the level of expression of one or more genes or gene products in at least a second biological sample taken from normal tissue; and
(c) comparing the level of expression of one or more genes or gene products in the first biological sample with the level of expression of one or more genes or gene products in the second biological sample;
wherein a change in the level of expression of one or more genes or gene products in the first biological sample compared to the level of expression of one or more genes or gene products in the second biological sample is indicative of a disease state.

5. The method of claim 4, wherein one or more genes are selected from the group consisting of SEQ ID NOs: 1, 3, 5, 7, 9, 11, 13, 15, 17, 19, 21, 23, 25, 27, 29, 31, 33, 35, 37, 39, 41, 43, 45, 47,49, 51, 53, 55, 57, 59, 61, 63, 65, 67, 69, 71, 73, 74, 76, 78, 80, 82, 84, 86, 88, 90, 92, 94,96, 98, 100, 102, 104, 106, 108, 110, 112, 114, 116, 118, 120, 122, 124, 126, 128, 130, 132, 134, 136, 138, 140, 142, 144, 146, 148, 150, 152, 154, 156, 158, 160, 162, 164, 166, 168, 170, 172, 174, 176, 178, 180, 182, 184, 186, 188, 190, 192, 194, 196, 198, 200, 202, 204, 206, 208, 210, 212, 214, 216, 218, 220, 222, 224, 226, 228, 230, 232, 234, 236, 238, 240, 242, 244, 246, 248, 250, 252, 254, 256, 258, 260, 262, 264, 266, 268, 270, 272, 274, 276, 278, 280, 282, 284, 286, 288, 290, 292, 294, 296, 298, 300, 302, 304, 306, 308, 310, 312, 314, 316, 318, 320, 322, 324, 326, 328, 330, 332, 334, 336, 338, 340, 342, 344, 346, 348, 350, 353, 355, 357, 359, 361, 363, 365, 367, 369, 371, 373, 375, 377, 379, 381, 383, 385, 387, 389, 391, 393, 395, 397, and 399.

6. The method of claim 4, wherein one or more gene products are polypeptides selected from the group consisting of SEQ ID NOs: 2, 4, 6, 8, 10, 12, 14, 16, 18, 20, 22, 24, 26, 28, 30, 32, 34, 36, 38, 40, 42, 44, 46, 48, 50, 52, 54, 56, 58, 60, 62, 64, 66, 68, 70, 72, 75, 77, 79, 81, 83, 85, 87, 89, 91, 93, 95, 97, 99, 101, 103, 105, 107, 109, 111, 113, 115, 117, 119, 121, 123, 125, 127, 129, 131, 133, 135, 137, 139, 141, 143, 145, 147, 149, 151, 153, 155, 157, 159, 161, 163, 165, 167, 169, 171, 173, 175, 177, 179, 181, 183, 185, 187, 189, 191, 193, 195, 197, 199, 201, 203, 205, 207, 209, 211, 213, 215, 217, 219, 221, 223, 225, 227, 229, 231, 233, 235, 237, 239, 241, 243, 245, 247, 249, 251, 253, 255, 257, 259, 261, 263, 265, 267, 269, 271, 273, 275, 277, 279, 281, 283, 285, 287, 289, 291, 293, 295, 297, 299, 301, 303, 305, 307, 309, 311, 313, 315, 317, 319, 321, 323, 325, 327, 329, 331, 333, 335, 337, 339, 341, 343, 345, 347, 349, 351, 352, 354, 356, 358, 360, 362, 364, 366, 368, 370, 372, 374, 376, 378, 380, 382, 384, 386, 388, 390, 392, 394, 369, 398, and 400.

7. A method to monitor the response of a patient being treated for lung cancer by administering a anti-cancer agent, comprising the steps of:
(a) determining the level of expression of one or more genes or gene products in a first biological sample taken from the patient prior to treatment with the anti-cancer agent;
(b) determining the level of expression of one or more genes or gene products in at least a second biological sample taken from the patient subsequent to the treatment with the anti-cancer agent; and
(c) comparing the level of expression of one or more one genes(s) or gene products in the second biological sample with the level of expression of one or more one genes(s) or gene products in the first biological sample;
wherein a change in the level of expression of one or more genes or gene products in the second biological sample compared to the level of expression of one or more genes or gene products in the first biological sample indicates the efficacy of the treatment with the anti-cancer agent.

8. The method of claim 7, wherein one or more genes are selected from the group consisting of SEQ ID NOs: 1, 3, 5, 7, 9, 11, 13, 15, 17, 19, 21, 23, 25, 27, 29, 31, 33, 35, 37, 39, 41, 43, 45, 47, 49, 51, 53, 55, 57, 59, 61, 63, 65, 67, 69, 71, 73, 74, 76, 78, 80, 82, 84, 86, 88, 90, 92, 94,96, 98, 100, 102, 104, 106, 108, 110, 112, 114, 116, 118, 120, 122, 124, 126, 128, 130, 132, 134, 136, 138, 140, 142, 144, 146, 148, 150, 152, 154, 156, 158, 160, 162, 164, 166, 168, 170, 172, 174, 176, 178, 180, 182, 184, 186, 188, 190, 192, 194, 196, 198, 200, 202, 204, 206, 208, 210, 212, 214, 216, 218, 220, 222, 224, 226, 228, 230, 232, 234, 236, 238, 240, 242, 244, 246, 248, 250, 252, 254, 256, 258, 260, 262, 264, 266, 268, 270, 272, 274, 276, 278, 280, 282, 284, 286, 288, 290, 292, 294, 296, 298, 300, 302, 304, 306, 308, 310, 312, 314, 316, 318, 320, 322, 324, 326, 328, 330, 332, 334, 336, 338, 340, 342, 344, 346, 348, 350, 353, 355, 357, 359, 361, 363, 365, 367, 369, 371, 373, 375, 377, 379, 381, 383, 385, 387, 389, 391, 393, 395, 397, and 399.

9. The method of claim 7, wherein one or more gene products are polypeptides selected from the group consisting of SEQ ID NOs: 2, 4, 6, 8, 10, 12, 14, 16, 18, 20, 22, 24, 26, 28, 30, 32, 34, 36, 38, 40, 42, 44, 46, 48, 50, 52, 54, 56, 58, 60, 62, 64, 66, 68, 70, 72, 75, 77, 79, 81, 83, 85, 87, 89, 91, 93, 95, 97, 99, 101, 103, 105, 107, 109, 111, 113, 115, 117, 119, 121, 123, 125, 127, 129, 131, 133, 135, 137, 139, 141, 143, 145, 147, 149, 151, 153, 155, 157, 159, 161, 163, 165, 167, 169, 171, 173, 175, 177, 179, 181, 183, 185, 187, 189, 191, 193, 195, 197, 199, 201, 203, 205, 207, 209, 211, 213, 215, 217, 219, 221, 223, 225, 227, 229, 231, 233, 235, 237, 239, 241, 243, 245, 247, 249, 251, 253, 255, 257, 259, 261, 263, 265, 267, 269, 271, 273, 275, 277, 279, 281, 283, 285, 287, 289, 291, 293, 295, 297, 299, 301, 303, 305, 307, 309, 311, 313, 315, 317, 319, 321, 323, 325, 327, 329, 331, 333, 335, 337, 339, 341, 343, 345, 347, 349, 351, 352, 354, 356, 358, 360, 362, 364, 366, 368, 370, 372, 374, 376, 378, 380, 382, 384, 386, 388, 390, 392, 394, 369, 398, and 400.

10. A method for identifying a compound useful for the treatment of lung cancer comprising the steps of:
(a) analyzing the level of expression of one or more genes and/or gene products in a cell or tissue sample prior to treatment with the compound;
(b) analyzing the level of expression of one or more genes and/or gene products in a cell or tissue sample subsequent to treatment with the compound;
wherein a variation in the expression level of the gene and/or gene product is indicative of drug efficacy.

11. The method of claim 10, wherein one or more genes are selected from the group consisting of SEQ ID NOs: 1, 3, 5, 7, 9, 11, 13, 15, 17, 19, 21, 23, 25, 27, 29, 31, 33, 35, 37, 39, 41, 43, 45, 47, 49, 51, 53, 55, 57, 59, 61, 63, 65, 67, 69, 71, 73, 74, 76, 78, 80, 82, 84, 86, 88, 90, 92, 94, 96, 98, 100, 102, 104, 106, 108, 110, 112, 114, 116, 118, 120, 122, 124, 126, 128, 130, 132, 134, 136, 138, 140, 142, 144, 146, 148, 150, 152, 154, 156, 158, 160, 162, 164, 166, 168, 170, 172, 174, 176, 178, 180, 182, 184, 186, 188, 190, 192, 194, 196, 198, 200, 202, 204, 206, 208, 210, 212, 214, 216, 218, 220, 222, 224, 226, 228, 230, 232, 234, 236, 238, 240, 242, 244, 246, 248, 250, 252, 254, 256, 258, 260, 262, 264, 266, 268, 270, 272, 274, 276, 278, 280, 282, 284, 286, 288, 290, 292, 294, 296, 298, 300, 302, 304, 306, 308, 310, 312, 314, 316, 318, 320, 322, 324, 326, 328, 330, 332, 334, 336, 338, 340, 342, 344, 346, 348, 350, 353, 355, 357, 359, 361, 363, 365, 367, 369, 371, 373, 375, 377, 379, 381, 383, 385, 387, 389, 391, 393, 395, 397, and 399.

12. The method of claim 10, wherein one or more gene products are polypeptides selected from the group consisting of SEQ ID NOs: 2, 4, 6, 8, 10, 12, 14, 16, 18, 20, 22, 24, 26, 28, 30, 32, 34, 36, 38, 40, 42, 44, 46, 48, 50, 52, 54, 56, 58, 60, 62, 64, 66, 68, 70, 72, 75, 77, 79, 81, 83, 85, 87, 89, 91, 93, 95, 97, 99, 101, 103, 105, 107, 109, 111, 113, 115, 117, 119, 121, 123, 125, 127, 129, 131, 133, 135, 137, 139, 141, 143, 145, 147, 149, 151, 153, 155, 157, 159, 161, 163, 165, 167, 169, 171, 173, 175, 177, 179, 181, 183, 185, 187, 189, 191, 193, 195, 197, 199, 201, 203, 205, 207, 209, 211, 213, 215, 217, 219, 221, 223, 225, 227, 229, 231, 233, 235, 237, 239, 241, 243, 245, 247, 249, 251, 253, 255, 257, 259, 261, 263, 265, 267, 269, 271, 273, 275, 277, 279, 281, 283, 285, 287, 289, 291, 293, 295, 297, 299, 301, 303, 305, 307, 309, 311, 313, 315, 317, 319, 321, 323, 325, 327, 329, 331, 333, 335, 337, 339, 341, 343, 345, 347, 349, 351, 352, 354, 356, 358, 360, 362, 364, 366, 368, 370, 372, 374, 376, 378, 380, 382, 384, 386, 388, 390, 392, 394, 369, 398, and 400.

13. An array for distinguishing between normal and disease tissues, comprising two or more probes corresponding to two or more genes selected from the group consisting of SEQ ID NOs: 1, 3, 5, 7, 9, 11, 13, 15, 17, 19, 21, 23, 25, 27, 29, 31, 33, 35, 37, 39, 41, 43, 45, 47, 49, 51, 53, 55, 57, 59, 61, 63, 65, 67, 69, 71, 73, 74, 76, 78, 80, 82, 84, 86, 88, 90, 92, 94, 96, 98, 100, 102, 104, 106, 108, 110, 112, 114, 116, 118, 120, 122, 124, 126, 128, 130, 132, 134, 136, 138, 140, 142, 144, 146, 148, 150, 152, 154, 156, 158, 160, 162, 164, 166, 168, 170, 172, 174, 176, 178, 180, 182, 184, 186, 188, 190, 192, 194, 196, 198, 200, 202, 204, 206, 208, 210, 212, 214, 216, 218, 220, 222, 224, 226, 228, 230, 232, 234, 236, 238, 240, 242, 244, 246, 248, 250, 252, 254, 256, 258, 260, 262, 264, 266, 268, 270, 272, 274, 276, 278, 280, 282, 284, 286, 288, 290, 292, 294, 296, 298, 300, 302, 304, 306, 308, 310, 312, 314, 316, 318, 320, 322, 324, 326, 328, 330, 332, 334, 336, 338, 340, 342, 344, 346, 348, 350, 353, 355, 357, 359, 361, 363, 365, 367, 369, 371, 373, 375, 377, 379, 381, 383, 385, 387, 389, 391, 393, 395, 397, and 399.

14. An array for distinguishing between normal and disease tissues, comprising two or more polypeptides selected from the group consisting of SEQ ID NOs: 2, 4, 6, 8, 10, 12, 14, 16, 18, 20, 22, 24, 26, 28, 30, 32, 34, 36, 38, 40, 42, 44, 46, 48, 50, 52, 54, 56, 58, 60, 62, 64, 66, 68, 70, 72, 75, 77, 79, 81, 83, 85, 87, 89, 91, 93, 95, 97, 99, 101, 103, 105, 107, 109, 111, 113, 115, 117, 119, 121, 123, 125, 127, 129, 131, 133, 135, 137, 139, 141, 143, 145, 147, 149, 151, 153, 155, 157, 159, 161, 163, 165, 167, 169, 171, 173, 175, 177, 179, 181, 183, 185, 187, 189, 191, 193, 195, 197, 199, 201, 203, 205, 207, 209, 211, 213, 215, 217, 219, 221, 223, 225, 227, 229, 231, 233, 235, 237, 239, 241, 243, 245, 247, 249, 251, 253, 255, 257, 259, 261, 263, 265, 267, 269, 271, 273, 275, 277, 279, 281, 283, 285, 287, 289, 291, 293, 295, 297, 299, 301, 303, 305, 307, 309, 311, 313, 315, 317, 319, 321, 323, 325, 327, 329, 331, 333, 335, 337, 339, 341, 343, 345, 347, 349, 351, 352, 354, 356, 358, 360, 362, 364, 366, 368, 370, 372, 374, 376, 378, 380, 382, 384, 386, 388, 390, 392, 394, 369, 398, and 400.
